(19) United States
(12) Patent Application Publication
(10) Pub. No.: US 2021/0139890 A1
(43) Pub. Date: May 13, 2021

(54) NOVEL CRISPR RNA TARGETING ENZYMES AND SYSTEMS AND USES THEREOF

(71) Applicant: Arbor Biotechnologies, Inc., Cambridge, MA (US)

(72) Inventors: David R. CHENG, Boston, MA (US); David A. SCOTT, Cambridge, MA (US); Winston X. YAN, Brookline, MA (US); Shaorong CHONG, Somerville, MA (US)

(21) Appl. No.: 16/626,932

(22) PCT Filed: Jul. 2, 2018
(86) PCT No.: PCT/US2018/040649

§ 371 Date: Dec. 27, 2019

Related U.S. Application Data
(63) Continuation-in-part of application No. 15/916,271, filed on Mar. 8, 2018, now Pat. No. 10,392,616.
Application No. 15/916,271 is a continuation-in-part of application No. 15/916,274, filed on Mar. 8, 2018.
(60) Provisional application No. 62/635,443, filed on Feb. 26, 2018.
(60) Provisional application No. 62/628,921, filed on Feb. 9, 2018.
(60) Provisional application No. 62/626,679, filed on Feb. 5, 2018.
(60) Provisional application No. 62/619,691, filed on Jan. 19, 2018.
(60) Provisional application No. 62/587,381, filed on Nov. 16, 2017.
(60) Provisional application No. 62/580,880, filed on Nov. 2, 2017.
(60) Provisional application No. 62/572,367, filed on Oct. 13, 2017.
(60) Provisional application No. 62/527,957, filed on Jun. 30, 2017.

(51) Int. Cl. C12N 15/11; C12N 15/113; C12N 9/22; C07K 14/195; C12N 15/62

(52) U.S. Cl. CPC C12N 15/11; C12N 15/111; C12N 15/113; C12N 2310/20; C07K 14/195; C12N 15/62; C12N 9/22

(57) ABSTRACT

The disclosure describes novel systems, methods, and compositions for the manipulation of nucleic acids in a targeted fashion. The disclosure describes non-naturally occurring, engineered CRISPR systems, components, and methods for targeted modification of a nucleic acid.

### CROSS REFERENCE TO RELATED APPLICATIONS

[0001] This application claims the benefit of priority of U.S. Application No. 62/527,957, filed Jun. 30, 2017; U.S. Application No. 62/572,367, filed Oct. 13, 2017; U.S. Application No. 62/580,880, filed Nov. 2, 2017; U.S. Application No. 62/587,381, filed Nov. 16, 2017; U.S. Application No. 62/619,691, filed Jan. 19, 2018; U.S. Application No. 62/626,679, filed Feb. 5, 2018; U.S. Application No. 62/628,921, filed Feb. 9, 2018; U.S. Application No. 62/635,443, filed Feb. 26, 2018; U.S. application Ser. No. 15/916,271, filed Mar. 8, 2018 and U.S. application Ser. No. 15/916,274, filed Mar. 8, 2018. The content of each of the foregoing applications is hereby incorporated by reference in its entirety.

### SEQUENCE LISTING

[0002] The instant application contains a Sequence Listing which has been submitted electronically in ASCII format and is hereby incorporated by reference in its entirety. Said ASCII copy, created on Mar. 20, 2020, is named 51451-0020011_3.23.20_ST25 and is 1,925,607 bytes in size.

### FIELD OF THE INVENTION

[0003] The present disclosure relates to novel CRISPR systems and components, systems for detecting CRISPR systems, and methods and compositions for use of the CRISPR systems in, for example, nucleic acid targeting and manipulation.

### BACKGROUND

[0004] Recent advances in genome sequencing technologies and analysis have yielded significant insights into the genetic underpinning of biological activities in many diverse areas of nature, ranging from prokaryotic biosynthetic pathways to human pathologies. To fully understand and evaluate the vast quantity of information produced by genetic sequencing technologies, equivalent increases in the scale, efficacy, and ease of technologies for genome and epigenone manipulation are needed. These novel genone and epigenome engineering technologies will accelerate the development of novel applications in numerous areas, including biotechnology, agriculture, and human therapeutics.

[0005] Clustered Regularly Interspaced Short Palindromic Repeats (CRISPR) and the CRISPR-associated (Cas) genes, collectively known as the CRISPR-Cas or CRISPR/Cas systems, are currently understood to provide immunity to bacteria and archaea against phage infection. The CRISPR-Cas systems of prokaryotic adaptive immunity are an extremely diverse group of proteins effectors, non-coding elements, as well as loci architectures, some examples of which have been engineered and adapted to produce important biotechnologies.

[0006] The components of the systems involved in host defense include one or more effector proteins capable of modifying DNA or RNA and a RNA guide element that is responsible for targeting these protein activities to a specific sequence on the phage DNA or RNA. The RNA guide is composed of a CRISPR RNA (crRNA) and may require an additional trans-activating RNA (tracrRNA) to enable targeted nucleic acid manipulation by the effector protein(s). The crRNA consists of a direct repeat (DR) responsible for protein binding to the crRNA and a spacer sequence, which may be engineered to be complementary to a desired nucleic acid target sequence. In this way, CRISPR systems can be programmed to target DNA or RNA targets by modifying the spacer sequence of the crRNA.

[0007] CRISPR-Cas systems can be broadly classified into two classes: Class I systems are composed of multiple effector proteins that together form a complex around a crRNA, and Class 2 systems that consist of a single effector protein that complexes with the crRNA to target DNA or RNA substrates. The single-subunit effector compositions of the Class 2 systems provide a simpler component set for engineering and application translation, and has thus far bee important sources of programmable effectors. The discovery, engineering, and optimization of novel Class 2 systems may lead to widespread and powerful programmable technologies for genome engineering and beyond.

### SUMMARY

[0008] CRISPR-Cas systems are adaptive immune systems in archaea and bacteria that defend the species against foreign genetic elements. The characterization and engineering of Class 2 CRISPR-Cas systems, exemplified by CRISPR-Cas9, have paved the way for a diverse array of biotechnology applications in genome editing and beyond. Nevertheless, there remains a need for additional programmable effectors and systems for modifying nucleic acids and polynucleotides (i.e., DNA, RNA, or any hybrid, derivative, or modification) beyond the current CRISPR-Cas systems that enable novel applications through their unique properties.

[0009] The present disclosure provides methods for computational identification of new single-effector CRISPR Class 2 systems from genomic databases, together with the development of the natural loci into engineered systems, and experimental validation and application translation.

[0010] In on aspect, the disclosure provides engineered, non-naturally occurring Clustered Regularly Interspaced Short Palindromic Repeat (CRISPR)—associated (Cas) systems that include: i) an RNA guide or a nucleic acid encoding the RNA guide, wherein the RNA guide includes or consists of a direct repeat sequence and a spacer sequence capable of hybridizing (e.g., hybridizes under appropriate conditions) to a target nucleic acid; and ii) a Type VI-D CRISPR-Cas effector protein or a nucleic acid encoding the effector protein, wherein the effector protein includes or consists of an amino acid sequence having at least 85% sequence identity to an amino acid sequence provided in Table 2 (e.g., SEQ ID NOs. 1-31, and 200-350), wherein the effector protein is capable of binding (e.g., binds under appropriate conditions) to the RNA guide and of targeting the target nucleic acid sequence complementary to the RNA guide spacer sequence.

[0011] In some embodiments, the effector protein includes or consists of an amino acid sequence provided in Table 2 (e.g., SEQ ID NOs. 1-31, and 200-350). In some embodiments, the effector protein is RspCas13d (SEQ ID NO: 2) or EsCas13d (SEQ ID NO: 1).

[0012] In some embodiments, the effector protein includes at least two HEPN domains. In some embodiments, none, one, or two or more of the HEPN domains are catalytically deactivated.

[0013] In another aspect, the disclosure provides engineered, non-naturally occurring Clustered Regularly Interspaced Short Palindromic Repeat (CRISPR)—associated (Cas) systems that include: i) an RNA guide or a nucleic acid encoding the RNA guide, wherein the RNA guide includes a direct repeat sequence and a spacer sequence capable of hybridizing (e.g., hybridizes under appropriate conditions) to a target nucleic acid; ii) a CRISPR-associated protein or a nucleic acid encoding the CRISPR-associated protein; and iii) an accessory protein or a nucleic acid encoding the accessory protein, wherein the accessory protein includes at least one WYL domain, wherein the WYL domain includes an amino acid sequence PXXX₁XXXXXXXXXYL (SEQ ID NO: 198), wherein X₁ is C, V, I, L, P, F, Y, M, or W, and wherein X is any amino acid; and/or at least one ribbon-ribbon-helix (RHH) fold or at least one helix-turn-helix (HTH) domain; wherein the CRISPR-associated protein is capable of binding (e.g., binds under appropriate conditions) to the RNA guide and of targeting the target nucleic acid sequence complementary to the spacer sequence, and wherein the accessory protein modulates an activity of the CRISPR-associated protein.

[0014] In another aspect, the disclosure provides engineered, non-naturally occurring Clustered Regularly Interspaced Short Palindromic Repeat (CRISPR)—associated (Cas) systems that include: i) an RNA guide or a nucleic acid encoding the RNA guide, wherein the RNA guide includes a direct repeat sequence and a spacer sequence capable of hybridizing (e.g., hybridizes under appropriate conditions) to a target nucleic acid; ii) a CRISPR-associated protein or a nucleic acid encoding the CRISPR-associated protein; and an accessory protein or a nucleic acid encoding the accessory protein, wherein the accessory protein includes at least one WYL domain, and wherein the accessory protein includes an amino acid sequence having at least 80% (e.g., 81%, 82%, 83%, 84%, 85%, 86%, 87% 88%, 89%, 90%, 91%, 92%, 93%, 94%, 95%, 96%, 97%, 98%, 99%, or 100%) sequence identity to an amino acid sequence provided in any one of Tables 4, 5, and 6 (e.g., SEQ ID NOs. 78-93, and 590-671); wherein the CRISPR-associated protein is capable of binding (e.g., binds under appropriate conditions) to the RNA guide and of targeting the target nucleic acid sequence complementary to the spacer sequence, and wherein the accessory protein modulates an activity of the CRISPR-associated protein.

[0015] In some embodiments, the activity is a nuclease activity (e.g., a DNAse activity, a targeted RNAse activity, or a collateral RNAse activity).

[0016] In some embodiments, the accessory protein increases the activity of the CRISPR-associated protein. In some embodiments, the accessory protein decreases the activity of the CRISPR-associated protein.

[0017] In some embodiments, the accessory protein includes or consists of an amino acid sequence provided in any one of Tables 4, 5, and 6 (e.g., SEQ ID NOs. 78-93, and 590-671).

[0018] In some embodiments, the accessory protein includes or is RspWYL1 (SEQ ID NO: 81).

[0019] In some embodiments, the targeting of the target nucleic acid results in a modification of the target nucleic acid.

[0020] In some embodiments, the CRISPR-associated protein is a Class 2 CRISPR-Cas system protein. In some embodiments, the CRISPR-associated protein includes a RuvC domain (e.g., at least one, two, three, or more RuvC domains). In some embodiments, the CRISPR-associated protein is selected from the group consisting of a Type VI Cas protein, a Type V Cas protein, and a Type II Cas protein. In some embodiments, the CRISPR-associated protein is a Cas13a protein, a Cas13b protein, a Cas13c protein, a Cas12a protein, or a Cas9 protein. In some embodiments, the CRISPR-associated protein is a Type VI-D CRISPR-Cas effector protein comprising at least two HEPN domains, wherein none, one, or two or more of the HEPN domains are catalytically deactivated.

[0021] In some embodiments, the effector protein includes an amino acid sequence having at least 85% sequence identity to an amino acid sequence provided in Table 2 (e.g., SEQ ID NOs. 1-31, and 200-350). In some embodiments, the effector protein includes or consists of an amino acid sequence provided in Table 2 (e.g., SEQ ID NOs. 1-31, and 200-350). In some embodiments, the effector protein includes or is RspCas13d (SEQ ID NO: 2) or EsCas13d (SEQ ID NO: 1).

[0022] In some embodiments, the target nucleic acid is an RNA. In some embodiments, the target nucleic acid is a DNA.

[0023] In some embodiments, the modification of the target nucleic acid is a cleavage event. In some embodiments, the modification results in: (a) decreased transcription; (b) decreased translation; or (c) both (a) and (b), of the target nucleic acid. In some embodiments, modification results in (a) increased transcription; (b) increased translation; or (c) both (a) and (b), of the target nucleic acid.

[0024] In some embodiments, the effector protein includes one or more amino acid substitutions within at least one of the HEPN domains. In some embodiments, the one or more one amino acid substitutions include an alanine substitution at an amino acid residue corresponding to R295, H300, R849, or H854 of SEQ ID NO: 1, or R288, H293, R820, or H825 of SEQ ID NO: 2. In some embodiments, the one or more amino acid substitutions result in a reduction of an nuclease activity of the Type VI-D CRISPR-Cas effector protein, as compared to the nuclease activity of the Type VI-D CRISPR-Cas effector protein without the one or more acid substitutions.

[0025] In some embodiments, the RNA guide includes a direct repeat sequence that includes or consists of a nucleotide sequence provided in Table 3 (e.g., SEQ ID NOs: 32-49, 52-77, 351-589). In some embodiments, the direct repeat sequence includes 5′-X₁X₂X₃X₄TX₅TX₆AAAC-3′ (SEQ ID NO: 199) at the 3′ terminal end of the RNA guide, and wherein X₁ is A or C or G, X₂ is A or G or T, X₃ is A or G or T, X₄ is C or G or T, X₅ is C or T, and X₆ is A or G. In some embodiments, the direct repeat sequence includes or consists of either 5′-CACCCGTGCAAAATTGCAGGGGTCTAAAAC-3′ (SEQ ID NO: 152) or 5′-CACTGGTGCAAATTTGCACTAGTCTAAAAC-3′ (SEQ ID NO: 153).

[0026] In some embodiments, the spacer includes or consists of from about 15 to about 42 nucleotides.

[0027] In some embodiments, the RNA guide further includes a trans-activating CRISPR RNA (tracrRNA).

[0028] In some embodiments, the systems include a single-stranded donor template or a double-stranded donor template. In some embodiments, the donor template is a DNA or an RNA.

[0029] In some embodiments, the systems include a target RNA or a nucleic acid encoding the target RNA, wherein the target RNA includes a sequence that is capable of hybridizing (e.g., hybridizes under appropriate conditions) to the spacer sequence of the RNA guide.

[0030] In some embodiments, the systems are present in a delivery system (e.g., a nanoparticle, a liposome, an adeno-associated virus, an exosome, a microvesicle, and a gene-gun).

[0031] In another aspect, the disclosure provides a cell including any of the systems described herein. In some embodiments, the cell is a eukaryotic cell (e.g., a mammalian cell or a plant cell). In some embodiments, the cell is a prokaryotic cell (e.g., a bacterial cell).

[0032] In another aspect, the disclosure provides an animal model or a plant model including a cell that includes any of the systems described herein.

[0033] In another aspect, the disclosure provides methods of cleaving a target nucleic acid (and compositions for use in such methods), which include contacting a target nucleic acid with a system described herein, wherein the spacer sequence is complementary to at least 15 nucleotides of the target nucleic acid, wherein the CRISPR-associated protein or the Type VI-D CRISPR effector protein associates with the RNA guide to form a complex, wherein the complex binds to a target nucleic acid sequence that is complementary to the at least 15 nucleotides of the spacer sequence, and wherein upon binding of the complex to the target nucleic acid sequence the CRISPR-associated protein or the Type VI-D CRISPR effector protein cleaves the target nucleic acid. In some embodiments, the target nucleic acid is within a cell.

[0034] In another aspect the disclosure provides methods of inducing dormancy or death of a cell which include contacting the cell with a system described herein (and compositions for use in such methods), wherein the spacer sequence is complementary to at least 15 nucleotides of the target nucleic acid, wherein the CRISPR-associated protein or the Type VI-D CRISPR effector protein associates with the RNA guide to form a complex, wherein the complex binds to a target nucleic acid sequence that is complementary to the at least 15 nucleotides of the spacer sequence, and wherein upon binding of the complex to the target nucleic acid sequence the CRISPR-associated protein or the Type VI-D CRISPR-Cas effector protein cleaves a non-target nucleic acid within the cell, thereby inducing dormancy or death of the cell. In some embodiments, the death is via apoptosis, necrosis, necroptosis, or a combination thereof.

[0035] In some embodiments of any of the methods described herein (and compositions for use in such methods), the target nucleic acid is an RNA selected from the group consisting of an mRNA, a tRNA, a ribosomal RNA, a non-coding RNA, a lncRNA, or a nuclear RNA. In some embodiments of any of the methods described herein, the target nucleic acid is a DNA selected from the group consisting of chromosomal DNA, mitochondrial DNA, single-stranded DNA, or plasmid DNA.

[0036] In some embodiments of any of the methods described herein (and compositions for use in such methods), upon binding of the complex to the target nucleic acid, the CRISPR-associated protein or the Type VI-D CRISPR-Cas effector protein exhibits collateral RNAse activity.

[0037] In some embodiments of any of the methods described herein (and compositions for use in such methods), the cell is a cancer cell (e.g., a tumor cell). In some embodiments, the cell is an infectious agent cell or a cell infected with an infectious agent. In some embodiments, the cell is a bacterial cell, a cell infected with a virus, a cell infected with a prion, a fungal cell, a protozoan, or a parasite cell.

[0038] In another aspect, the disclosure provides methods of treating a condition or disease in a subject in need thereof and compositions for use in such methods. The methods include administering to the subject a system described herein, wherein the spacer sequence is complementary to at least 15 nucleotides of a target nucleic acid associated with the condition or disease, wherein the CRISPR-associated protein or the Type VI-D CRISPR-Cas effector protein associates with the RNA guide to form a complex, wherein the complex binds to a target nucleic acid sequence that is complementary to the at least 15 nucleotides of the spacer sequence, and wherein upon binding of the complex to the target nucleic acid sequence the CRISPR-associated protein or the Type VI-D CRISPR-Cas effector protein cleaves the target nucleic acid, thereby treating the condition or disease in the subject.

[0039] In some embodiments of the methods described herein (and compositions for use in such methods), the condition or disease is a cancer or an infectious disease. In some embodiments, the condition or disease is cancer, and wherein the cancer is selected from the group consisting of Wilms' tumor, Ewing sarcoma, a neuroendocrine tumor, a glioblastoma, a neuroblastoma, a melanoma, skin cancer, breast cancer, colon cancer, rectal cancer, prostate cancer, liver cancer, renal cancer, pancreatic cancer, lung cancer, biliary cancer, cervical cancer, endometrial cancer, esophageal cancer, gastric cancer, head and neck cancer, medullary thyroid carcinoma, ovarian cancer, glioma, lymphoma, leukemia, myeloma, acute lymphoblastic leukemia, acute myelogenous leukemia, chronic lymphocytic leukemia, chronic myelogenous leukemia, Hodgkin's lymphoma, non-Hodgkin's lymphoma, and urinary bladder cancer.

[0040] In another aspect, the disclosure provides the use of a system described herein in a method selected from the group consisting of RNA sequence specific interference; RNA sequence-specific gene regulation; screening of RNA, RNA products, ncRNA, non-coding RNA, nuclear RNA, or mRNA; mutagenesis; inhibition of RNA splicing; fluorescence in situ hybridization; breeding; induction of cell dormancy; induction of cell cycle arrest; reduction of cell growth and/or cell proliferation; induction of cell anergy; induction of cell apoptosis; induction of cell necrosis; induction of cell death; or induction of programmed cell death.

[0041] In some embodiments of any of the systems described herein, the effector protein is fused to a base-editing domain, an RNA methyltransferase, an RNA demethylase, a splicing modifier, a localization factor, or a translation modification factor. In some embodiments of any of the systems described herein, the CRISPR-associated protein is fused to a base-editing domain (e.g., Adenosine Deaminase Acting on RNA (ADAR) 1 (ADAR1), ADAR2, apolipoprotein B mRNA editing enzyme, catalytic polypeptide-like (APOBEC)), and activation-induced cytidine deaminase (AID)), an RNA methyltransferase, an RNA demethylase, a splicing modifier, a localization factor, or a translation modification factor.

[0042] In some embodiments, the systems described herein include an RNA-binding fusion polypeptide that includes an RNA-binding domain (e.g., MS2) and a base-editing domain (e.g., ADAR1, ADAR2, APOBEC, or AID).

[0043] In another aspect, the disclosure provides method of modifying an RNA molecule, comprising contacting the RNA molecule with a system described herein.

[0044] In yet another aspect, the disclosure provides methods of detecting a target RNA in a sample (and compositions for use in such methods). The methods include: a) contacting the sample with: (i) an RNA guide or a nucleic acid encoding the RNA guide, wherein the RNA guide includes a direct repeat sequence and a spacer sequence capable of hybridizing (e.g., hybridizes under appropriate conditions) to the target RNA; (ii) a Type VI-D CRISPR-Cas effector protein or a nucleic acid encoding the effector protein; and (iii) a labeled detector RNA; wherein the effector protein associates with the RNA guide to form a complex; wherein the RNA guide hybridizes to the target RNA; and wherein upon binding of the complex to the target RNA, the effector protein exhibits collateral RNAse activity and cleaves the labeled detector RNA; and b) measuring a detectable signal produced by cleavage of the labeled detector RNA, wherein said measuring provides for detection of the single-stranded target RNA in the sample. In some embodiments, the methods further include comparing the detectable signal with a reference signal and determining the amount of target RNA in the sample. In some embodiments, the target RNA is single-stranded. In some embodiments, the target RNA is double-stranded. In some embodiments, the methods further include transcribing (e.g., using a T7 polymerase) a DNA molecule (e.g., a DNA molecule present in the sample) to produce the target RNA. In some embodiments, the target RNA was transcribed from a DNA molecule. In some embodiments, the methods further include pre-amplifying a nucleic acid in the sample (e.g., via isothermal amplification, recombinase polymerase amplification (RPA), or immunoprecipitation) prior to the contacting step.

[0045] In some embodiments, the methods further include contacting the sample with an accessory protein comprising at least one WYL domain. In some embodiments, the accessory protein includes an amino acid sequence having at least 80% (e.g., 81%, 82%, 83%, 84%, 85%, 86%, 87% 88%, 89%, 90%, 91%, 92%, 93%, 94%, 95%, 96%, 97%, 98%, 99%, or 100%) sequence identity to an amino acid sequence provided in any one of Tables 4, 5, and 6. In some embodiments, the accessory protein includes or is RspWYL1 (SEQ ID NO: 81).

[0046] In some embodiments, the effector protein includes an amino acid sequence having at least 85% sequence identity to an amino acid sequence provided in Table 2 (e.g., SEQ ID NOs. 1-31, and 200-350).

[0047] In some embodiments, the measuring is performed using gold nanoparticle detection, fluorescence polarization, colloid phase transition/dispersion, electrochemical detection, and semiconductor based-sensing.

[0048] In some embodiments, the labeled detector RNA includes a fluorescence-emitting dye pair, a fluorescence resonance energy transfer (FRET) pair, or a quencher/fluor pair. In some embodiments, the labeled detector RNA produces a first detectable signal prior to cleavage by the effector protein and a second detectable signal after cleavage by the effector protein.

[0049] In some embodiments, a detectable signal is produced when the labeled detector RNA is cleaved by the effector protein.

[0050] In some embodiments, upon cleavage of the labeled detector RNA by the effector protein, an amount of detectable signal produced by the labeled detector RNA is decreased. In some embodiments, upon cleavage of the labeled detector RNA by the effector protein, an amount of detectable signal produced by the labeled detector RNA is increased.

[0051] In another aspect, the disclosure provides engineered, non-naturally occurring Clustered Regularly Interspaced Short Palindromic Repeat (CRISPR)—associated (Cas) systems that include or consist of: i) an RNA guide or a nucleic acid encoding the RNA guide, wherein the RNA guide includes a direct repeat sequence and a spacer sequence capable of hybridizing (e.g., hybridizes under appropriate conditions) to a target nucleic acid; ii) a CRISPR-associated protein or a nucleic acid encoding the CRISPR-associated protein; and an accessory protein or a nucleic acid encoding the accessory protein, wherein the accessory protein includes at least one WYL domain, and wherein the accessory protein includes an amino acid sequence having at least 85% sequence identity to an amino acid sequence provided in any one of Tables 4, 5, and 6 (e.g., SEQ ID NOs. 78-93, and 590-671); wherein the CRISPR-associated protein is capable of binding (e.g., binds under appropriate conditions) to the RNA guide and of targeting the target nucleic acid sequence complementary to the spacer sequence, and wherein the accessory protein modulates an activity of the CRISPR-associated protein.

[0052] In some embodiments, the activity is a nuclease activity (e.g., a DNAse activity or an RNAse activity). In some embodiments, the RNAse activity is targeted RNAse activity or a collateral RNAse activity.

[0053] In some embodiments, the accessory protein increases the activity of the CRISPR-associated protein. In some embodiments, the accessory protein decreases the activity of the CRISPR-associated protein.

[0054] In some embodiments, the accessory protein includes one WYL domain. In some embodiments, the accessory protein includes two WYL domains. In some embodiments, the accessory protein further includes a helix-turn-helix (HTH) fold. In some embodiments, the accessory protein further includes a ribbon-helix-helix (RHH) fold.

[0055] In some embodiments, the accessory protein includes or consists of an amino acid sequence having at least 80% (e.g., 81%, 82%, 83%, 84%, 85%, 86%, 87% 88%, 89%, 90%, 91%, 92%, 93%, 94%, 95%, 96%, 97%, 98%, 99%, or 100%) sequence identity to an amino acid sequence provided in any one of Tables 4, 5, and 6 (e.g., SEQ ID NOs. 78-93, and 590-671). In some embodiments, the accessory protein includes or consists of an amino acid sequence provided in any one of Tables 4, 5, and 6 (e.g., SEQ ID NOs. 78-93, and 590-671). In some embodiments, the accessory protein is RspWYL1 (SEQ ID NO: 81).

[0056] In some embodiments, the target nucleic acid includes or is an RNA. In some embodiments, the target nucleic acid includes or is a DNA.

[0057] In some embodiments, the targeting of the target nucleic acid results in a modification (e.g., a cleavage event) of the target nucleic acid. In some embodiments, the modification results in cell toxicity. In some embodiments, the modification results in decreased transcription and/or decreased translation of the target nucleic acid. In some embodiments, the modification results in increased transcription and/or increased translation of the target nucleic acid.

[0058] In some embodiments, the CRISPR-associated protein is a Class 2 CRISPR-Cas system protein. In some embodiments, the CRISPR-associated protein includes a RuvC domain. In some embodiments, the CRISPR-associated protein is selected from the group consisting of a Type VI Cas protein, a Type V Cas protein, and a Type II Cas protein. In some embodiments, the CRISPR-associated protein is a Cas13a protein, a Cas13b protein, a Cas13c protein, a Cas12a protein, or a Cas9 protein.

[0059] In some embodiments, the CRISPR-associated protein is a Type VI-D CRISPR-Cas effector protein comprising at least two HEPN domains (e.g., two, three, four, or more HEPN domains). In some embodiments, the Type VI-D CRISPR-Cas effector protein includes two HEPN domains. In some embodiments, at least one (e.g., one, two, three, four, or more) of the HEPN domains is catalytically inactivated.

[0060] In some embodiments, the Type VI-D CRISPR-Cas effector protein includes or consists of an amino acid sequence having at least 80% (e.g., 81%, 82%, 83%, 84%, 85%, 86%, 87% 88%, 89%, 90%, 91%, 92%, 93%, 94%, 95%, 96%, 97%, 98%, 99%, or 100%) sequence identity to an amino acid sequence provided in Table 2 (e.g., SEQ ID NOs. 1-31, and 200-350). In some embodiments, the Type VI-D CRISPR-Cas effector protein includes or consists of an amino acid sequence provided in Table 2 (e.g., SEQ ID NOs. 1-31, and 200-350). In some embodiments, the Type VI-D CRISPR-Cas effector protein is RspCas13d (SEQ ID NO: 2) or EsCas13d (SEQ ID NO: 1).

[0061] In some embodiments, the Type VI-D CRISPR-Cas effector protein includes or consists of one or more (e.g., two, three, four, five or six) amino acid substitutions within at least one of the HEPN domains. In some embodiments, the Type VI-D CRISPR-Cas effector protein includes six or less (e.g., five, four, three, two or one) amino acid substitutions within at least one of the HEPN domains. In some embodiments, the one or more one amino acid substitutions include or consist of an alanine substitution at an amino acid residue corresponding to R295, H300, R849, or H854 of SEQ ID NO: 1, or R288, H293, R820, or H825 of SEQ ID NO: 2. In some embodiments, the one or more amino acid substitutions result in a reduction of an RNAse activity of the Type VI-D CRISPR-Cas effector protein, as compared to the RNAse activity of the Type VI-D CRISPR-Cas effector protein without the one or more acid substitutions.

[0062] In some embodiments, the CRISPR-associated proteins include or consist of at least one (e.g., two, three, four, five, six, or more) nuclear localization signal (NLS). In some embodiments, the CRISPR-associated protein include or consist of at least one (e.g., two, three, four, five, six, or more) nuclear export signal (NES). In some embodiments, the CRISPR-associated protein includes at least one (e.g., two, three, four, five, six, or more) NLS and at least one (e.g., two, three, four, five, six, or more) NES.

[0063] In some embodiments, the direct repeat sequence includes 5′-X₁X₂X₃X₄TX₅TX₆AAAC-3′ (SEQ ID NO: 151) at the 3′ terminal end of the RNA guide, and wherein X₁ is A or C or G, X₂ is G or T, X₃ is A or G, X₄ is C or G or T, X₅ is C or T, and X₆ is A or G. In some embodiments, the direct repeat sequence includes 5′-X₁X₂X₃X₄TX₅TX₆AAAC-3′ (SEQ ID NO: 199) at the 3′ terminal end of the RNA guide, and wherein X₁ is A or C or G, X₂ is A or G or T, X₃ is A or G or T, X₄ is C or G or T, X₅ is C or T, and X₆ is A or G. In some embodiments, the direct repeat sequence includes or consists of a nucleotide sequence provided in Table 3 (e.g., SEQ ID NOs 32-49, 52-77, 351-589). In some embodiments, the direct repeat sequence includes or consists of either 5′-CACCCGTGCAAAATTGCAGGGGTCTAAAAC-3′ (SEQ ID NO: 152) or 5′-CACTGGTGCAAATTTGCACTAGTCTAAAAC-3′ (SEQ ID NO: 153).

[0064] In some embodiments, the spacer includes from about 15 to about 42 nucleotides. In some embodiments, the RNA guide includes a trans-activating CRISPR RNA (tracrRNA).

[0065] In some embodiments of the systems described herein, the systems include a single-stranded donor template or a double-stranded donor template (e.g., a single-stranded DNA, a double stranded DNA, a single-stranded RNA, or a double stranded RNA).

[0066] In another aspect, the disclosure provides engineered, non-naturally occurring Clustered Regularly Interspaced Short Palindromic Repeat (CRISPR)—associated (Cas) systems that include or consist of: i) an RNA guide or a nucleic acid encoding the RNA guide, wherein the RNA guide includes a direct repeat sequence and a spacer sequence capable of hybridizing (e.g., hybridizes under appropriate conditions) to a target nucleic acid, wherein the direct repeat sequence includes 5′-X₁X₂X₃X₄TX₅TX₆AAAC-3′ (SEQ ID NO: 151) at the 3′ terminal end of the RNA guide, and wherein X₁ is A or C or G, X₂ is G or T, X₃ is A or G, X₄ is C or G or T, X₅ is C or T, and X₆ is A or G; and ii) a Type VI-D CRISPR-Cas effector protein or a nucleic acid encoding the effector protein, wherein the effector protein is capable of binding (e.g., binds under appropriate conditions) to and of targeting the target nucleic acid sequence complementary to the RNA guide spacer sequence, and wherein the target nucleic acid is an RNA.

[0067] In one aspect, the disclosure provides engineered, non-naturally occurring Clustered Regularly Interspaced Short Palindromic Repeat (CRISPR)—associated (Cas) systems that include or consist of: i) an RNA guide or a nucleic acid encoding the RNA guide, wherein the RNA guide includes or consists of a direct repeat sequence and a spacer sequence capable of hybridizing (e.g., hybridizes under appropriate conditions) to a target nucleic acid, wherein the direct repeat sequence includes 5′-X₁X₂X₃X₄TX₅TX₆AAAC-3′ (SEQ ID NO: 199) at the 3′ terminal end of the RNA guide, and wherein X₁ is A or C or G, X₂ is A or G or T, X₃ is A or G or T, X₄ is C or G or T, X₅ is C or T, and X₆ is A or G; and ii) a Type VI-D CRISPR-Cas effector protein or a nucleic acid encoding the effector protein, wherein the effector protein is capable of binding (e.g., binds under appropriate conditions) to and of targeting the target nucleic acid sequence complementary to the RNA guide spacer sequence, and wherein the target nucleic acid is an RNA.

[0068] In some embodiments, the Type VI-D CRISPR-Cas effector protein includes at least two HEPN domains. In some embodiments, the protein is about 1200 amino acids or less (e.g., 1100, 1000, 1050, 900, 950, 800 amino acids) in length.

[0069] In other embodiments, the targeting of the target nucleic acid results in a modification of the target nucleic acid. In some embodiments, the modification of the target nucleic acid is a cleavage event. In some embodiments, the modification results in cell toxicity.

[0070] In some embodiments, the modification results in decreased transcription and/or decreased translation of the target nucleic acid. In some embodiments, the modification results in increased transcription and/or increased translation of the target nucleic acid.

[0071] In various embodiments, the systems further include a donor template nucleic acid. In some embodiments, the donor template nucleic acid is a DNA or an RNA.

[0072] In some embodiments, the Type VI-D CRISPR-Cas effector protein includes one or more (e.g., two, three, four, five or six) amino acid substitutions within at least one of the HEPN domains. In some embodiments, the one or more amino acid substitutions include an alanine substitution at an amino acid residue corresponding to R295, H300, R849, or H854 of SEQ ID NO: 1, or R288, H293, R820, or H825 of SEQ ID NO: 2. In some embodiments, the one or more amino acid substitutions result in a reduction of an RNAse activity of the Type VI-D CRISPR-Cas effector protein, as compared to the RNAse activity of the Type VI-D CRISPR-Cas effector protein without the one or more amino acid substitutions.

[0073] In some embodiments, the Type VI-D CRISPR-Cas effector protein includes or consists of an amino acid sequence having at least 80% (e.g., 81%, 82%, 83%, 84%, 85%, 86%, 87% 88%, 89%, 90%, 91%, 92%, 93%, 94%, 95%, 96%, 97%, 98%, 99%, or 100%) sequence identity to an amino acid sequence provided in Table 2 (e.g., SEQ ID NOs. 1-31, and 200-350). In some embodiments, the Type VI-D CRISPR-Cas effector protein includes or consists of an amino acid sequence provided in Table 2 (e.g., SEQ ID NOs. 1-31, and 200-350). In some embodiments, the Type VI-D CRISPR-Cas effector protein is RspCas13d (SEQ ID NO: 2) or EsCas13d (SEQ ID NO: 1).

[0074] In some embodiments, the systems include an accessory protein or a nucleic acid encoding the accessory protein, wherein the accessory protein includes at least one WYL domain, and wherein the accessory protein includes or consists of an amino acid sequence having at least 80% (e.g., 81%, 82%, 83%, 84%, 85%, 86%, 87% 88%, 89%, 90%, 91%, 92%, 93%, 94%, 95%, 96%, 97%, 98%, 99%, or 100%) sequence identity to an amino acid sequence provided in any one of Tables 4, 5, and 6 (e.g., SEQ ID NOs. 78-93, and 590-671).

[0075] In some embodiments, the accessory protein includes two WYL domains. In some embodiments, the accessory protein further includes a helix-turn-helix (HTH) fold and/or a ribbon-helix-helix (RHH) fold. In some embodiments, the accessory protein is RspWYL1 (SEQ ID NO: 81).

[0076] In some embodiments, the accessory protein modulates (e.g., increases or decreases) an activity of the Type VI-D CRISPR-Cas effector protein. In some embodiments, the activity is an RNAse activity, an RNA-binding activity, or both. In some embodiments, the RNAse activity is a targeted RNAse activity or a collateral RNAse activity.

[0077] In some embodiments, the CRISPR-associated protein includes at least one (e.g., two, three, four, five, six, or more) nuclear localization signal (NLS). In some embodiments, the CRISPR-associated protein includes at least one (e.g., two, three, four, five, six, or more) nuclear export signal (NES). In some embodiments, the CRISPR-associated protein includes at least one (e.g., two, three, four, five, six, or more) NLS and at least one (e.g., two, three, four, five, six, or more) NES.

[0078] In some embodiments, the direct repeat sequence includes or consists of a nucleotide sequence provided in Table 3 (e.g., SEQ ID NOs 32-49, 52-77, 351-589). In some embodiments, the direct repeat sequence includes or consists of either 5′-CACCCGTGCAAAATTGCAGGGGTCTAAAAC-3′ (SEQ ID NO: 152) or 5′-CACTGGTGCAAATTTGCACTAGTCTAAAAC-3′ (SEQ ID NO: 153).

[0079] In some embodiments, the spacer sequence includes or consists of from about 15 to about 42 nucleotides.

[0080] In some embodiments, the systems provided herein include a single-stranded donor template or a double-stranded donor template (e.g., an RNA or a DNA molecule).

[0081] In some embodiments, the systems provided herein include a target RNA or a nucleic acid encoding the target RNA, wherein the target RNA includes a sequence that is capable of hybridizing (e.g., hybridizes under appropriate conditions) to the spacer sequence of the RNA guide.

[0082] In another aspect, the disclosure provides engineered, non-naturally occurring Clustered Regularly Interspaced Short Palindromic Repeat (CRISPR)—associated (Cas) systems that include or consist of: i) an RNA guide or a nucleic acid encoding the RNA guide, wherein the RNA guide includes or consists of a direct repeat sequence and a spacer sequence capable of hybridizing (e.g., hybridizes under appropriate conditions) to a target nucleic acid, wherein the direct repeat sequence includes 5′-X₁X₂X₃X₄TX₅TX₆AAAC-3′ (SEQ ID NO: 151) at the 3′ terminal end of the RNA guide, and wherein X₁ is A or C or G, X₂ is G or T, X₃ is A or G, X₄ is C or G or T, X₅ is C or T, and X₆ is A or G; and ii) a Type VI-D CRISPR-Cas effector protein and/or a nucleic acid encoding the effector protein, wherein the effector protein is about 1200 or fewer amino acids, and wherein the effector protein is capable of binding (e.g., binds under appropriate conditions) to the RNA guide and of targeting the target nucleic acid sequence complementary to the spacer sequence.

[0083] In another aspect, the disclosure provides engineered, non-naturally occurring Clustered Regularly Interspaced Short Palindromic Repeat (CRISPR)—associated (Cas) systems that include or consist of: i) an RNA guide or a nucleic acid encoding the RNA guide, wherein the RNA guide includes or consists of a direct repeat sequence and a spacer sequence capable of hybridizing (e.g., hybridizes under appropriate conditions) to a target nucleic acid, wherein the direct repeat sequence includes 5′-X₁X₂X₃X₄TX₅TX₆AAAC-3′ (SEQ ID NO: 199) at the 3′ terminal end of the RNA guide, and wherein X₁ is A or C or G, X₂ is A or G or T, X₃ is A or G or T, X₄ is C or G or T, X₅ is C or T, and X₆ is A or G; and ii) a Type VI-D CRISPR-Cas effector protein and/or a nucleic acid encoding the effector protein, wherein the effector protein is about 1200 or fewer amino acids, and wherein the effector protein is capable of binding (e.g., binds under appropriate conditions) to the RNA guide and of targeting the target nucleic acid sequence complementary to the spacer sequence.

[0084] In another aspect, the disclosure provides engineered, non-naturally occurring Clustered Regularly Interspaced Short Palindromic Repeat (CRISPR)—associated (Cas) systems that include or consist of: i) an RNA guide or a nucleic acid encoding the RNA guide, wherein the RNA guide includes or consists of a direct repeat sequence and a spacer sequence capable of hybridizing (e.g., hybridizes under appropriate conditions) to a target nucleic acid, wherein the direct repeat sequence includes 5′-X₁X₂X₃X₄TX₅TX₆AAAC-3′ (SEQ ID NO: 151) at the 3′ terminal end of the RNA guide, and wherein X₁ is A or C or G, X₂ is G or T, X₃ is A or G, X₄ is C or G or T, X₅ is C or T, and X₆ is A or G; and ii) a Type VI-D CRISPR-Cas effector protein or a nucleic acid encoding the effector protein, wherein the effector protein is about 950 or fewer amino acids in length, and wherein the effector protein is capable of binding (e.g., binds under appropriate conditions), to the RNA guide and of targeting the target nucleic acid sequence complementary to the spacer sequence.

[0085] In another aspect, the disclosure provides engineered, non-naturally occurring Clustered Regularly Interspaced Short Palindromic Repeat (CRISPR)—associated (Cas) systems that include or consist of: i) an RNA guide or a nucleic acid encoding the RNA guide, wherein the RNA guide includes or consists of a direct repeat sequence and a spacer sequence capable of hybridizing (e.g., hybridizes under appropriate conditions) to a target nucleic acid, wherein the direct repeat sequence includes 5′-X₁X₂X₃X₄TX₅TX₆AAAC-3′ (SEQ ID NO: 199) at the 3′ terminal end of the RNA guide, and wherein X₁ is A or C or G, X₂ is A or G or T, X₃ is A or G or T, X₄ is C or G or T, X₅ is C or T, and X₆ is A or G; and ii) a Type VI-D CRISPR-Cas effector protein or a nucleic acid encoding the effector protein, wherein the effector protein is about 950 or fewer amino acids in length, and wherein the effector protein is capable of binding (e.g., binds under appropriate conditions) to the RNA guide and of targeting the target nucleic acid sequence complementary to the spacer sequence.

[0086] In another aspect, the disclosure provides engineered, non-naturally occurring Clustered Regularly Interspaced Short Palindromic Repeat (CRISPR)—associated (Cas) systems that include or consist of: i) an RNA guide (e.g., a crRNA) or a nucleic acid encoding the RNA guide, wherein the RNA guide includes or consists of a direct repeat sequence and a spacer sequence capable of hybridizing (e.g., hybridizes under appropriate conditions) to a target nucleic acid, wherein the direct repeat sequence includes 5′-X₁X₂X₃X₄TX₅TX₆AAAC-3′ (SEQ ID NO: 151) at the 3′ terminal end of the RNA guide, and wherein X₁ is A or C or G, X₂ is G or T, X₃ is A or G, X₄ is C or G or T, X₅ is C or T, and X₆ is A or G; ii) a Type VI-D CRISPR-Cas effector protein or a nucleic acid encoding the effector protein, wherein the effector protein is capable of binding (e.g., binds under appropriate conditions) to the RNA guide and of targeting the target nucleic acid sequence complementary to the spacer sequence; and iii) an accessory protein, wherein the accessory protein includes at least one WYL domain, wherein the accessory protein includes or consists of an amino acid sequence having at least 85% sequence identity to an amino acid sequence provided in any one of Tables 4, 5, and 6 (e.g., SEQ ID NOs. 78-93, and 590-671), and wherein the accessory protein is capable of regulating (e.g., regulates under appropriate conditions) an activity of the effector protein.

[0087] In another aspect, the disclosure provides engineered, non-naturally occurring Clustered Regularly Interspaced Short Palindromic Repeat (CRISPR)—associated (Cas) systems that include or consist of: i) an RNA guide (e.g., a crRNA) or a nucleic acid encoding the RNA guide, wherein the RNA guide includes or consists of a direct repeat sequence and a spacer sequence capable of hybridizing (e.g., hybridizes under appropriate conditions) to a target nucleic acid, wherein the direct repeat sequence includes 5′-X₁X₂X₃X₄TX₅TX₆AAAC-3′ (SEQ ID NO: 199) at the 3′ terminal end of the RNA guide, and wherein X₁ is A or C or G, X₂ is A or G or T, X₃ is A or G or T, X₄ is C or G or T, X₅ is C or T, and X₆ is A or G; ii) a Type VI-D CRISPR-Cas effector protein or a nucleic acid encoding the effector protein, wherein the effector protein is capable of binding (e.g., binds under appropriate conditions) to the RNA guide and of targeting the target nucleic acid sequence complementary to the spacer sequence; and iii) an accessory protein, wherein the accessory protein includes at least one WYL domain, wherein the accessory protein includes or consists of an amino acid sequence having at least 85% sequence identity to an amino acid sequence provided in any one of Tables 4, 5, and 6 (e.g., SEQ ID NOs. 78-93, and 590-671), and wherein the accessory protein is capable of regulating (e.g., regulates under appropriate conditions) an activity of the effector protein.

[0088] In some embodiments, the accessory protein is RspWYL1 (SEQ ID NO: 81).

[0089] In some embodiments, the effector protein includes at least two HEPN domains. In some embodiments, the effector protein includes or consists of an amino acid sequence having at least 85% sequence identity to an amino acid sequence provided in Table 2 (e.g., SEQ ID NOs. 1-31, and 200-350). In some embodiments, the effector protein is RspCas13d (SEQ ID NO: 2) or EsCas13d (SEQ ID NO: 1).

[0090] In some embodiments, the CRISPR-associated protein (e.g., Type VI-D CRISPR-Cas effector protein) is fused to a base-editing domain (e.g., Adenosine Deaminase Acting on RNA (ADAR) 1; ADAR2; apolipoprotein B mRNA editing enzyme, catalytic polypeptide-like (APOBEC); and activation-induced cytidine deaminase (AID)). In some embodiments, the base-editing domain is further fused to an RNA-binding domain.

[0091] In some embodiments, the CRISPR associated protein (e.g., a Type VI-D CRISPR-Cas effector protein) is fused to a RNA methyltransferase, a RNA demethylase, a splicing modifier, a localization factor, or a translation modification factor.

[0092] In some embodiments, the CRISPR-associated (e.g., a Type VI-D CRISPR-Cas effector protein) further includes a linker sequence. In some embodiments, the CRISPR-associated protein (e.g., a Type VI-D CRISPR-Cas effector protein) includes one or more mutations or amino acid substitutions that render the CRISPR-associated protein unable to cleave RNA.

[0093] In some embodiments, the systems described herein also include an RNA-binding fusion polypeptide that includes an RNA-binding domain and a base-editing domain (e.g., ADAR1, ADAR2, APOBEC, and AID). In some embodiments, the RNA-binding domain is MS2, PP7, or Qbeta.

[0094] In some embodiments, the systems described herein include a nucleic acid encoding the CRISPR-associated protein (e.g., a Type VI-D CRISPR-Cas effector protein). In some embodiments, the nucleic acid encoding the CRISPR-associated protein is operably linked to a promoter (e.g., a constitutive promoter or an inducible promoter). In some embodiments, the nucleic acid encoding the CRISPR-associated protein is codon-optimized for expression in a cell (e.g., a mammalian cell or a bacterial cell).

[0095] In some embodiments, the systems described herein include a nucleic acid encoding the accessory protein. In some embodiments, the nucleic acid encoding the accessory protein is operably linked to a promoter (e.g., a constitutive promoter or an inducible promoter). In some embodiments, the nucleic acid encoding the accessory protein is codon-optimized for expression in a cell.

[0096] In some embodiments, the systems described herein include a nucleic acid encoding one or more RNA guides (e.g., crRNAs). In some embodiments, the nucleic acid encoding the one or more RNA guides is operably linked to a promoter (e.g., a constitutive promoter or an inducible promoter).

[0097] In some embodiments, the systems described herein include a nucleic acid encoding a target nucleic acid (e.g., a target RNA). In some embodiments, the nucleic acid encoding the target nucleic acid is operably linked to a promoter (e.g., a constitutive promoter or an inducible promoter).

[0098] In some embodiments, the systems described herein include a nucleic acid encoding a CRISPR-associated protein and a nucleic acid encoding an accessory protein in a vector. In some embodiments, the system further includes one or more nucleic acids encoding an RNA guide present in the vector.

[0099] In some embodiments, the systems provided herein include a nucleic acid encoding a Type VI-D CRISPR-Cas effector protein in a vector.

[0100] In some embodiments, the systems provided herein include a nucleic acid encoding the Type VI-D CRISPR-Cas effector protein and a nucleic acid encoding the accessory protein in a vector. In some embodiments, the system further includes one or more nucleic acids encoding one or more RNA guides (e.g., crRNAs) in the vector.

[0101] In some embodiments, the vectors included in the systems are viral vectors (e.g., retroviral vectors, lentiviral vectors, adenoviral vectors, adeno-associated vectors, and herpes simplex vectors. In some embodiments, the vectors included in the system are phage vectors.

[0102] In some embodiments, the systems provided herein are in a delivery system. In some embodiments, the delivery system is a nanoparticle, a liposome, an exosome, a microvesicle, and a gene-gun.

[0103] The disclosure also provides a cell (e.g., a eukaryotic cell or a prokaryotice cell (e.g., a bacterial cell)) comprising a system described herein. In some embodiments, the eukaryotic cell is a mammalian cell (e.g., a human cell) or a plant cell. The disclosure also provides animal models (e.g., rodent, rabbit, dog, monkey, or ape models) and plant model that include the cells.

[0104] In another aspect, the disclosure provides methods of cleaving a target nucleic acid (and compositions for use in such methods), wherein the methods include contacting the target nucleic acid with a system described herein, wherein the spacer sequence is complementary to at least 15 nucleotides of the target nucleic acid, wherein the CRISPR-associated protein or the Type VI-D CRISPR effector protein associates with the RNA guide to form a complex, wherein the complex binds to a target nucleic acid sequence that is complementary to the at least 15 nucleotides of the spacer sequence; and wherein upon binding of the complex to the target nucleic acid sequence the CRISPR-associated protein or the Type VI-D CRISPR effector protein cleaves the target nucleic acid. In some embodiments of the methods, the target nucleic acid is within a cell.

[0105] In another aspect, the disclosure also provides methods of inducing dormancy or death of a cell (and compositions for use in such methods), wherein the methods include contacting the cell with a system described herein, wherein the spacer sequence is complementary to at least 15 nucleotides of the target nucleic acid, wherein the Type VI-D CRISPR effector protein associates with the RNA guide to form a complex, wherein the complex binds to a target nucleic acid sequence that is complementary to the at least 15 nucleotides of the spacer sequence, and wherein upon binding of the complex to the target nucleic acid sequence the Type VI-D CRISPR-Cas effector protein cleaves a non-target nucleic acid within the cell, thereby inducing dormancy or death of the cell. In some embodiments of the methods described herein, the death of the cell is via apoptosis, necrosis, necroptosis, or a combination thereof.

[0106] In some embodiments, the target nucleic acid is an RNA molecule (e.g., an mRNA, a tRNA, a ribosomal RNA, a non-coding RNA, a lncRNA, or a nuclear RNA). In some embodiments, the target nucleic acid is a DNA molecule (e.g., chromosomal DNA, mitochondrial DNA, single-stranded DNA, or plasmid DNA).

[0107] In some embodiments of the methods described herein, upon binding of the complex to the target nucleic acid, the CRISPR-associated protein or the Type VI-D CRISPR-Cas effector protein exhibits collateral RNAse activity.

[0108] In some embodiments, the cell is a cancer cell (e.g., a tumor cell). In some embodiments, the cell is an infectious agent cell or a cell infected with an infectious agent. In some embodiments, the cell is a bacterial cell, a cell infected with a virus, a cell infected with a prion, a fungal cell, a protozoan, or a parasite cell.

[0109] In another aspect, the disclosure provides methods of treating a condition or disease in a subject in need thereof (and compositions for use in such methods, the methods include administering to the subject a system described herein, wherein the spacer sequence is complementary to at least 15 nucleotides of a target nucleic acid associated with the condition or disease, wherein the CRISPR-associated protein or the Type VI-D CRISPR-Cas effector protein associates with the RNA guide to form a complex, wherein the complex binds to a target nucleic acid sequence that is complementary to the at least 15 nucleotides of the spacer sequence; and wherein upon binding of the complex to the target nucleic acid sequence the CRISPR-associated protein or the Type VI-D CRISPR-Cas effector protein cleaves the target nucleic acid, thereby treating the condition or disease in the subject.

[0110] In some embodiments, the condition or disease is a cancer or an infectious disease. In some embodiments, the condition or disease is cancer, and wherein the cancer is selected from the group consisting of Wilms' tumor, Ewing sarcoma, a neuroendocrine tumor, a glioblastoma, a neuroblastoma, a melanoma, skin cancer, breast cancer, colon cancer, rectal cancer, prostate cancer, liver cancer, renal cancer, pancreatic cancer, lung cancer, biliary cancer, cervical cancer, endometrial cancer, esophageal cancer, gastric cancer, head and neck cancer, medullary thyroid carcinoma, ovarian cancer, glioma, lymphoma, leukemia, myeloma, acute lymphoblastic leukemia, acute myelogenous leukemia, chronic lymphocytic leukemia, chronic myelogenous leukemia, Hodgkin's lymphoma, non-Hodgkin's lymphoma, and urinary bladder cancer.

[0111] In another aspect, the disclosure provides the use of a system described herein in a method selected from the group consisting of RNA sequence specific interference; RNA sequence-specific gene regulation; screening of RNA, RNA products, ncRNA, non-coding RNA, nuclear RNA, or mRNA; mutagenesis; inhibition of RNA splicing; fluorescence in situ hybridization; breeding; induction of cell dormancy; induction of cell cycle arrest; reduction of cell growth and/or cell proliferation; induction of cell anergy; induction of cell apoptosis; induction of cell necrosis; induction of cell death; or induction of programmed cell death.

[0112] In some embodiments, the methods described herein are performed either in vitro, in vivo, or ex vivo.

[0113] The disclosure also provides methods of modifying an RNA molecule (and compostions for use in such methods), including contacting the RNA molecule with a system described herein. In some embodiments, the spacer sequence is complementary to at least 15 nucleotides of the RNA molecule.

[0114] The disclosure also provides methods of detecting a target RNA (e.g., a single-stranded RNA or a double-stranded RNA) in a sample, the methods including: a) contacting the sample with: (i) an RNA guide or a nucleic acid encoding the RNA guide, wherein the RNA guide includes a direct repeat sequence and a spacer sequence capable of hybridizing (e.g., hybridizes under appropriate conditions) to the target RNA; (ii) a Type VI-D CRISPR-Cas effector protein or a nucleic acid encoding the effector protein; and (iii) a labeled detector RNA; wherein the effector protein associates with the RNA guide to form a complex; wherein the RNA guide hybridizes to the target RNA; and wherein upon binding of the complex to the target RNA, the effector protein exhibits collateral RNAse activity and cleaves the labeled detector RNA; and b) measuring a detectable signal produced by cleavage of the labeled detector RNA, wherein said measuring provides for detection of the single-stranded target RNA in the sample.

[0115] In some embodiments, the Type VI-D CRISPR-Cas effector protein includes at least two HEPN domains. In some embodiments, the Type VI-D CRISPR-Cas effector protein is about 1200 amino acids or less in length.

[0116] In some embodiments, the Type VI-D CRISPR-Cas effector protein includes or consists of an amino acid sequence having at least 80% (e.g., 81%, 82%, 83%, 84%, 85%, 86%, 87% 88%, 89%, 90%, 91%, 92%, 93%, 94%, 95%, 96%, 97%, 98%, 99%, or 100%) sequence identity to an amino acid sequence provided in Table 2 (e.g., SEQ ID NOs. 1-31, and 200-350). In some embodiments, the Type VI-D CRISPR-Cas effector protein includes or consists of an amino acid sequence provided in Table 2 (e.g., SEQ ID NOs. 1-31, and 200-350). In some embodiments, the Type VI-D CRISPR-Cas effector protein is RspCas13d (SEQ ID NO: 2) or EsCas13d (SEQ ID NO: 1).

[0117] In some embodiments, the effector protein includes one or more amino acid substitutions within at least one of the HEPN domains. In some embodiments, the one or more amino acid substitutions include an alanine substitution at an amino acid residue corresponding to R295, H300, R849, or H854 of SEQ ID NO: 1, or R288, H293, R820, or H825 of SEQ ID NO: 2.

[0118] In some embodiments, the methods further include comparing the detectable signal with a reference signal and determining the amount of target RNA in the sample.

[0119] In some embodiments, the measuring is performed using gold nanoparticle detection, fluorescence polarization, colloid phase transition/dispersion, electrochemical detection, and semiconductor based-sensing.

[0120] In some embodiments, the labeled detector RNA includes a fluorescence-emitting dye pair. In some embodiments, the labeled detector RNA includes a fluorescence resonance energy transfer (FRET) pair. In some embodiments, the labeled detector RNA includes a quencher/fluor pair.

[0121] In some embodiments, upon cleavage of the labeled detector RNA by the effector protein, an amount of detectable signal produced by the labeled detector RNA is decreased.

[0122] In some embodiments, upon cleavage of the labeled detector RNA by the effector protein, an amount of detectable signal produced by the labeled detector RNA is increased. In some embodiments, the labeled detector RNA produces a first detectable signal prior to cleavage by the effector protein and a second detectable signal after cleavage by the effector protein.

[0123] In some embodiments, a detectable signal is produced when the labeled detector RNA is cleaved by the effector protein.

[0124] In some embodiments, the labeled detector RNA includes a modified nucleobase, a modified sugar moiety, a modified nucleic acid linkage, or a combination thereof.

[0125] In one aspect, the disclosure relates to engineered, non-naturally occurring Clustered Regularly Interspaced Short Palindromic Repeat (CRISPR)—associated (Cas) systems that include: an RNA guide or a nucleic acid encoding the RNA guide, wherein the RNA guide includes a direct repeat sequence and a spacer sequence capable of hybridizing (e.g., hybridizes under appropriate conditions) to a target nucleic acid, wherein the direct repeat sequence includes 5′-X1X2X3X4TX5TX6AAAC-3′ (SEQ ID NO: 151) at the 3′ terminal end of the RNA guide, and wherein X1 is A or C or G, X2 is G or T, X3 is A or G, X4 is C or G or T, X5 is C or T, and X6 is A or G; and a Type VI-D CRISPR-Cas effector protein or a nucleic acid encoding the effector protein, wherein the effector protein is capable of binding (e.g., binds under appropriate conditions) to the RNA guide and of targeting the target nucleic acid sequence complementary to the spacer sequence, and wherein the target nucleic acid is an RNA.

[0126] In one aspect, the disclosure relates to engineered, non-naturally occurring Clustered Regularly Interspaced Short Palindromic Repeat (CRISPR)—associated (Cas) systems that include or consist of: an RNA guide or a nucleic acid encoding the RNA guide, wherein the RNA guide includes a direct repeat sequence and a spacer sequence capable of hybridizing (e.g., hybridizes under appropriate conditions) to a target nucleic acid, wherein the direct repeat sequence includes 5′-X₁X₂X₃X₄TX₅TX₆AAAC-3′ (SEQ ID NO: 199) at the 3′ terminal end of the RNA guide, and wherein X₁ is A or C or G, X₂ is A or G or T, X₃ is A or G or T, X₄ is C or G or T, X₅ is C or T, and X₆ is A or G; and a Type VI-D CRISPR-Cas effector protein or a nucleic acid encoding the effector protein, wherein the effector protein is capable of binding (e.g., binds under appropriate conditions) to the RNA guide and of targeting the target nucleic acid sequence complementary to the spacer sequence, and wherein the target nucleic acid is an RNA.

[0127] In some embodiments of these systems, the Type VI-D CRISPR-Cas effector proteins include at least two HEPN domains. In some embodiments, the Type VI-D CRISPR-Cas effector proteins include an amino acid sequence having at least 90% identity to an amino acid sequence selected from the group consisting of SEQ ID NO: 12, SEQ ID NO: 1, and SEQ ID NO: 10. In other embodiments, the Type VI-D CRISPR-Cas effector proteins include an amino acid sequence having at least 95% sequence identity to an amino acid sequence provided in Table 2 (e.g., SEQ ID NOs. 1-31, and 200-350), or they can include an amino acid sequence provided in Table 2.

[0128] In various embodiments, the direct repeat sequence can include a nucleotide sequence provided in Table 3 (e.g., SEQ ID NOs 32-49, 52-77, 351-589).

[0129] In some embodiments, the targeting of the target nucleic acid results in a modification of the target nucleic acid. For example, the modification of the target nucleic acid can be a cleavage event.

[0130] In the new systems, the Type VI-D CRISPR-Cas effector proteins can include one or more amino acid substitutions within at least one of the HEPN domains resulting in a reduction of an RNAse activity of the Type VI-D CRISPR-Cas effector protein, as compared to the RNAse activity of the Type VI-D CRISPR-Cas effector protein without the one or more amino acid substitutions, e.g., 2, 3, 4, 5, 6, 7, or 8 amino acid substitutions. In some embodiments, the one or more amino acid substitutions include an alanine substitution at an amino acid residue corresponding to R295, H300, R849, or H854 of SEQ ID NO: 1, or R288, H293, R820, or H825 of SEQ ID NO: 2.

[0131] In some embodiments, the Type VI-D CRISPR-Cas effector protein is fused to a base-editing domain, e.g., to an RNA methyltransferase, a RNA demethylase, a splicing modifier, a localization factor, or a translation modification factor.

[0132] In various embodiments, the Type VI-D CRISPR-Cas effector protein includes at least one nuclear localization signal (NLS), at least one nuclear export signal (NES), or both.

[0133] In some embodiments, the direct repeat sequence includes either 5′-CACCCGTGCAAAATTGCAGGGGTCTAAAAC-3′ (SEQ ID NO: 152) or 5′-CACTGGTGCAAATTTGCACTAGTCTAAAAC-3′ (SEQ ID NO: 153). In some embodiments, the spacer consists of from about 15 to about 42 nucleotides.

[0134] In another aspect of the disclosure, the systems include the nucleic acid encoding the Type VI-D CRISPR-Cas effector protein, operably linked to a promoter. For example, the promoter can be a constitutive promoter.

[0135] In some embodiments, the nucleic acid encoding the Type VI-D CRISPR-Cas effector protein is codon-optimized for expression in a cell. In various embodiments, the nucleic acids encoding the Type VI-D CRISPR-Cas effector protein are operably linked to a promoter within in a vector, e.g., selected from the group consisting of a retroviral vector, a lentiviral vector, a phage vector, an adenoviral vector, an adeno-associated vector, and a herpes simplex vector.

[0136] In another aspect, the system is present in a delivery system selected from the group consisting of a nanoparticle, a liposome, an exosome, a microvesicle, and a gene-gun.

[0137] In some embodiments, the systems can further include a target RNA or a nucleic acid encoding the target RNA, wherein the target RNA includes a sequence that is capable of hybridizing (e.g., hybridizes under appropriate conditions) to the spacer sequence of the RNA guide.

[0138] In another aspect, the disclosure includes one or more cells that include the systems described herein.

[0139] In another aspect, the disclosure provides methods of cleaving a target nucleic acid.

[0140] The methods include contacting the target nucleic acid with a system as described herein; wherein the spacer sequence is complementary to at least 15 nucleotides of the target nucleic acid; wherein the Type VI-D CRISPR-Cas effector protein associates with the RNA guide to form a complex;

[0141] wherein the complex binds to a target nucleic acid sequence that is complementary to the at least 15 nucleotides of the spacer sequence; and wherein upon binding of the complex to the target nucleic acid sequence, the Type VI-D CRISPR-Cas effector protein cleaves the target nucleic acid.

[0142] In another aspect, the disclosure provides methods of inducing dormancy or death of a cell, e.g., in vitro or in vivo (and compositions for use in such methods), the method including contacting the cell with a system as described herein; wherein the spacer sequence is complementary to at least 15 nucleotides of the target nucleic acid within the cell; wherein the Type VI-D CRISPR-Cas effector protein associates with the RNA guide to form a complex; wherein the complex binds to the target nucleic acid sequence that is complementary to the at least 15 nucleotides of the spacer sequence; and wherein after binding of the complex to the target nucleic acid sequence, the Type VI-D CRISPR-Cas effector protein cleaves a non-target nucleic acid within the cell, thereby inducing dormancy or death of the cell.

[0143] In these methods, the cell can be a bacterial cell, a cell infected with a virus, a cell infected with a prion, a fungal cell, a protozoan, or a parasite cell.

[0144] In other embodiments, the disclosure provides methods of modifying a target nucleic acid in a sample, in which the methods include contacting the sample with a system as described herein, e.g., with fusion proteins; wherein the spacer sequence is complementary to at least 15 nucleotides of the target nucleic acid within the sample; wherein the Type VI-D CRISPR-Cas effector protein fused to the base editing domain associates with the RNA guide to form a complex; wherein the complex binds to the target nucleic acid sequence that is complementary to the at least 15 nucleotides of the spacer sequence; and wherein after binding of the complex to the target nucleic acid sequence, the Type VI-D CRISPR-Cas effector protein fused to the base-editing domain modifies at least one nucleobase of the target nucleic acid.

[0145] In another aspect, the disclosure provides methods of detecting a single-stranded target RNA in a sample. These methods include: a) contacting the sample with: (i) a RNA guide or a nucleic acid encoding the RNA guide, wherein the RNA guide includes a direct repeat sequence and a spacer sequence capable of hybridizing (e.g., hybridizes under appropriate conditions) to the target RNA; (ii) a Type VI-D CRISPR-Cas effector protein or a nucleic acid encoding the effector protein; and (iii) a labeled detector RNA; wherein the effector protein associates with the RNA guide to form a complex; wherein the RNA guide hybridizes to the target RNA; and wherein upon binding of the complex to the target RNA, the Type VI-D CRISPR-Cas effector protein exhibits collateral RNAse activity and cleaves the labeled detector RNA; and b) measuring a detectable signal produced by cleavage of the labeled detector RNA, wherein said measuring provides for detection of the single-stranded target RNA in the sample.

[0146] In these methods, the effector protein includes an amino acid sequence having at least 90% sequence identity to an amino acid sequence provided in Table 2 (e.g., SEQ ID NOs. 1-31, and 200-350). These methods can further include comparing the detectable signal with a reference signal and determining the amount of target RNA in the sample.

[0147] The term “cleavage event,” as used herein, refers to a break in a target nucleic acid created by a nuclease (e.g., a Type VI-D CRISPR-Cas effector protein) of a CRISPR system described herein. In some embodiments, the cleavage event is a single-stranded RNA break. In some embodiments, the cleavage event is a double-stranded RNA break. In some embodiments, the cleavage event is a double-stranded DNA break. In some embodiments, the cleavage event is a single-stranded DNA break.

[0148] The terms “CRISPR system” or “Clustered Interspaced Short Palindromic Repeat (CRISPR)-associated (Cas) system” as used herein refer to nucleic acids and/or proteins involved in the expression of, or directing the activity of, CRISPR-effectors, including sequences encoding CRISPR effectors, RNA guides, and other sequences and transcripts from a CRISPR locus. In some embodiments, the CRISPR system is an engineered, non-naturally occurring CRISPR system. In some embodiments, the components of a CRISPR system may include a nucleic acid(s) (e.g., a vector) encoding one or more components of the system, a component(s) in protein form, or a combination thereof.

[0149] The term “CRISPR array” as used herein refers to the nucleic acid (e.g., DNA) segment that includes CRISPR repeats and spacers, starting with the first nucleotide of the first CRISPR repeat and ending with the last nucleotide of the last (terminal) CRISPR repeat. Typically, each spacer in a CRISPR array is located between two repeats. The terms “CRISPR repeat,” or “CRISPR direct repeat,” or “direct repeat,” as used herein, refer to multiple short direct repeating sequences, which show very little or no sequence variation within a CRISPR array.

[0150] The term “CRISPR RNA” or “crRNA” as used herein refers to a RNA molecule including a guide sequence used by a CRISPR effector to target a specific nucleic acid sequence. Typically, crRNAs contains a sequence that mediates target recognition and a sequence that forms a duplex with a tracrRNA. In some embodiments, the crRNA: tracrRNA duplex binds to a CRISPR effector.

[0151] The terms “donor template” or “donor template nucleic acid,” as used herein refers to a nucleic acid molecule that can be used by one or more cellular proteins to modify the sequence of a target nucleic acid after a CRISPR-associated protein described herein has altered the target nucleic acid. In some embodiments, the donor template nucleic acid is a double-stranded nucleic acid. In some embodiments, the donor template nucleic acid is a single-stranded nucleic acid. In some embodiments, the donor template nucleic acid is linear.

[0152] In some embodiments, the donor template nucleic acid is circular (e.g., a plasmid). In some embodiments, the donor template nucleic acid is an exogenous nucleic acid molecule. In some embodiments, the donor template nucleic acid is an endogenous nucleic acid molecule (e.g., a chromosome). In some embodiments, the donor template is a DNA molecule. In some embodiments, the donor template is an RNA molecule.

[0153] The term “CRISPR effector,” “effector,” “CRISPR-associated protein,” or “CRISPR enzyme” as used herein refers to a protein that carries out an enzymatic activity or that binds to a target site on a nucleic acid specified by a RNA guide. Indifferent embodiments, a CRISPR effector has endonuclease activity, nickase activity, exonuclease activity, transposase activity, and/or excision activity. In some embodiments, the CRISPR-associated protein is a Type VI Cas protein, a Type V Cas protein, or a Type II Cas protein. I some embodiments, the CRISPR-associated protein is a Cas13a protein, a Cas13b protein, a Cas13c protein, a Cas13d protein, a Cas12a protein, or a Cas9 protein. In some embodiments, the CRISPR-associated protein is a Type VI-D CRISPR-Cas effector protein described herein.

[0154] The term “RNA guide” as used herein refers to any RNA molecule that facilitates the targeting of a protein described herein to a target nucleic acid. Exemplary “RNA guides” include, but are not limited to, crRNAs or crRNAs in combination with cognate trans-activating RNAs (tracrRNAs). The latter may be independent RNAs or fused as a single RNA using a linker. In some embodiments, the RNA guide is engineered to include a chemical or biochemical modification. In some embodiments, an RNA guide may include one or more nucleotides.

[0155] The term “origin of replication,” as used herein, refers to a nucleic acid sequence in a replicating nucleic acid molecule (e.g., a plasmid or a chromosome) that is recognized by a replication initiation factor or a DNA replicase.

[0156] As used herein, the term “targeting” refers to the ability of a complex including a CRISPR-associated protein and a RNA guide, such as a crRNA, to bind to a specific target nucleic acid and not to other nucleic acids that do not have the same sequence as the target nucleic acid.

[0157] As used herein, the term “target nucleic acid” refers to a specific nucleic acid sequence that specifically binds to a complex including a CRISPR-associated protein and a RNA guide described herein. In some embodiments, the target nucleic acid is or includes a gene. In some embodiments, the target nucleic acid is or includes a non-coding region (e.g., a promoter). In some embodiments, the target nucleic acid is single-stranded. In some embodiments, the target nucleic acid is double-stranded.

[0158] The terms “trans-activating crRNA” or “tracrRNA” as used herein refer to an RNA including a sequence that forms a structure required for a CRISPR-associated protein to bind to a specified target nucleic acid.

[0159] The term “collateral RNAse activity,” as used herein in reference to A CRISPR-associated protein, refers to non-specific RNAse activity of a CRISPR-associated protein after the enzyme has bound to and/or modified a specifically-targeted nucleic acid. In some embodiments, a CRISPR-associated protein (e.g., a Type VT-D CRISPR-Cas effector protein) exhibits collateral RNAse activity after binding to a target nucleic acid (e.g., a target RNA).

[0160] A nucleic acid that is cleaved or degraded by a CRISPR-associated protein in a non-specific manner (i.e., when the protein exhibits collateral RNAse activity) is referred to herein as a “non-target nucleic acid.”

[0161] Unless otherwise defined, all technical and scientific terms used herein have the same meaning as commonly understood by one of ordinary skill in the art to which this invention belongs. Although methods and materials similar or equivalent to those described herein can be used in the practice or testing of the present invention, suitable methods and materials are described below. All publications, patent applications, patents, and other references mentioned herein are incorporated by reference in their entirety. In case of conflict, the present specification, including definitions, will control. In addition, the materials, methods, and examples are illustrative only and not intended to be limiting. Citation or identification of any document in this application is not an admission that such document is available as prior art to the present invention.

[0162] Other features and advantages of the invention will be apparent from the following detailed description, and from the claims.

### BRIEF FIGURE DESCRIPTION

[0163] FIG. 1 depicts a schematic representation of a maximum likelihood tree topology for an exemplary subset of Cas13d, with the genomic arrangement of the genes encoding predicted protein components of Type VI-D system components shown to the right. Each locus sequence is identified by a protein accession or gene number, with the species name provided where available. Key proteins and CRISPR arrays are depicted as follows: white—Cas13d, horizontal stripes—WYL1 accessory protein, light gray—WYL domain containing protein, vertical stripes—Cas1, dark gray—Cas2.

[0164] FIG. 2A depicts a schematic tree comparing the different type VI subtype locus structures. Gene arrows are shown roughly proportional to size. Labels denote the following: WYL—WYL domain, HEPN—HEPN nuclease domain.

[0165] FIG. 2B depicts a size comparison for Cas13 proteins from the 4 type VI subtypes; error bars specify the mean and standard deviation.

[0166] FIG. 3 depicts a phylogenetic tree of Cas1 proteins from type II and type VI CRISPR-Cas systems. The tree was constructed for a non-redundant set of Cas1 proteins associated with Cas13d and type II and type VI CRISPR-Cas systems as described previously (see (Peters et al., 2017)). Several Cas1 proteins associated with subtype I-E systems were selected for an outgroup. Each sequence is denoted by a local numeric identifier, CRISPR-Cas type and species name (if available). Cas1 proteins associated with Cas13d are denoted by “CAS-VI-D”, and those associated with Cas13a by “CAS-VI-A”. Several branches were collapsed and are shown by triangles with CRISPR-Cas system indicated on the right. Support values are indicated for selected branches.

[0167] FIGS. 4A and 4B depict a phylogenetic tree constructed for a combined set of Cas13d sequences described (light gray) and previously described Cas13a sequences. Each sequence is denoted by a protein locus tag and species name (if available). Cas13d proteins form a clade with a 100% bootstrap support value (shown on branch).

[0168] FIGS. 5A, 5B and 5C depict a multiple sequence alignment of Cas13d protein sequences (RspCas13d (SEQ ID NO: 2) and EsCas13d (SEQ ID NO: 1) and Cas13a protein sequences (LbaCas13a (SEQ ID NO: 156), LbuCas13a (SEQ ID NO: 157), LshCas13a (SEQ ID NO: 158)). Previously identified domains of Cas13a are highlighted with varying background shading as indicated in the figure (NTD, N-terminal domain). Note the nearly complete absence of a counterpart to the Helical-1 domain of Cas13a in Cas13d (the alignment in this region cannot be considered reliable).

[0169] FIG. 6 depicts a phylogenetic tree of the WYL1 protein family. Exemplary WYL1 proteins associated with Cas13d are denoted by gray. In cases when a CRISPR array and/or other cas genes are present in the vicinity of the respective WYL1 gene (within 10 kb up- and downstream), the description includes “CRISPR”. Several branches were collapsed and are indicated by triangles. Domain organization is schematically shown next to each branch. Abbreviation: WYL—WYL domain (usually fused to a characteristic C-terminal subdomain); RHH—ribbon helix helix superfamily DNA binding domain.

[0170] FIG. 7 depicts a multiple sequence alignment of exemplary WYL1 protein sequences. The RHH domain is denoted by ‘r’ and the WYL domain fused to the characteristic C-terminal subdomain is denoted by ‘y’ underneath the alignment. The predicted secondary structure elements are shown (E, extended conformation (β-strand), H, α-helix).

[0171] FIG. 8 depicts a design of minimal engineered CRISPR-Cas systems for the Rsp and Es type VI-D CRISPR loci (referred to as RspCas13d and EsCas13d systems), with a spacer library tiling pACYC184 (both top strand and bottom strand).

[0172] FIG. 9 depicts a schematic of the bacterial negative selection screen used to evaluate functional parameters of RspCas13d and EsCas13d systems.

[0173] FIGS. 10A and 10B depict a negative control condition from bacterial screens for EsCas13d and RspCas13d systems, respectively. Solid and dashed lines represent both possible direct repeat (DR) orientations cloned into the screening library. Non-targeting CRISPR arrays (with spacers matching a GFP open reading frame) inserted into EsCas13d and RspCas13d screening systems showed minimal levels of depletion in bacterial negative selection screens (no GFP open reading frame was included in our screen system).

[0174] FIGS. 11A and 11B depict a negative control condition from bacterial screens for EsCas13d and RspCas13d systems, respectively. Solid and dashed lines represent both possible direct repeat (DR) orientations cloned into the screening library. Deletion of EsCas13d and RspCas13d-RspWYL1 open reading frames from the EsCas13d and RspCas13d screening systems resulted in minimal depletion of library CRISPR array elements in bacterial negative selection screens.

[0175] FIGS. 12A and 12B depict the distribution and magnitude of crRNA depletion from bacterial screens for EsCas13d and RspCas13d, respectively. Depletion value was calculated by normalized sequencing reads from the screen output divided by normalized reads from the pre-transformation screen input library for each crRNA spacer and orientation. Solid and dashed lines represent both possible direct repeat (DR) orientations cloned into the screening library. cloned into the screening library. The vertical dashed lines demarcate the intersection of the ranked screen hits with the depletion fraction of 0.1, below which we define as strongly depleted.

[0176] FIGS. 13A and 13B depict the location of strongly depleted targets of the active DR orientation over the strands and genetic features of the pACYC184 plasmid for EsCas13d and RspCas13d systems, respectively. Light gray outlines represent the total number of spacers (y-axis) targeting a location, while short bars depict the locations of strongly depleted spacers with heatmap color proportional to magnitude of depletion. Directional expression data for pACYC184 is plotted as a heatmap between the x-axes.

[0177] FIGS. 14A and 14B depict web logos for the 5′ and 3′ 30 nt regions flanking strongly depleted targets for EsCas13d and RspCas13d systems, and show no evidence of PFS or PAM requirements.

[0178] FIG. 14C depicts violin plots of bit scores of all possible PFS targeting rules of up to length 3 involving the target site and +/−15 nt flanking region, for BzCas13b, RspCas13d, and EsCas13d systems. Dots represent data points outside of the discernable density of the violin plot. These dots accurately recapitulate the known PFS positions of BzCas13b, as shown above the dots.

[0179] FIG. 15 depicts bar charts showing the fraction of hits for RspCas13d and EsCas13d systems according to features of the plasmid for all targets.

[0180] FIGS. 16A and 16B depict heatmaps of the fraction (# strongly depleted spacers)/(#strongly depleted spacers+# non-depleted spacers) for all target regions (CRISPR arrays with active direct repeat orientation only) with no predicted secondary structure between specific start (x-axis) and end (y-axis) locations. White boxes indicate specific target regions (bounded by start (x-axis) and end (y-axis) locations), where selection of spacers with no predicted secondary structure maximized targeting efficacy, while minimizing the number of screen spacers eliminated due to the presence of predicted secondary structure. Targets these spacer populations are referred to as “low secondary structure targets” for RspCas13d and EsCas13d respectively.

[0181] FIG. 16C depicts bar charts showing the fraction of hits for RspCas13d and EsCas13d systems according to features of the plasmid for low secondary structure targets.

[0182] FIG. 17 depicts a schematic of the RNA extraction from bacterial screen, next-generation sequencing (NGS), and alignment to determine the mature crRNA for EsCas13d.

[0183] Distribution of read counts by crRNA sequence location is depicted on the right, and the predicted EsCas13d mature crRNA secondary structure is shown.

[0184] FIG. 18 depicts a coomassie blue stained polyacrylamide gel of purified recombinant proteins EsCas13d, RspCas13d, and RspWYL1 respectively.

[0185] FIG. 19 depicts schematic representions of the major products identified from next-generation sequencing of in vitro cleaved RNA fragments from the pre-crRNA processing with EsCas13d and RspCas13d. The black line represents the direct repeats and associated secondary structure, the box represents the full-length spacer, and the filled triangle represents the cleavage sites. The lengths described are for processed EsCas13d crRNAs, with RspCas13d having one extra nucleotide due to the 31 nt natural length spacer used for instead of 30. Not depicted are the 3-4 nt at the 5′ end of the pre-crRNA from T7 in vitro transcription.

[0186] FIGS. 20A, 20B, 20C, and 20D depict denaturing gels displaying Cas13d mediated cleavage of their cognate pre-crRNAs over a dose titration of effector concentration. The dependence of Cas13d crRNA biogenesis on divalent metal cations was evaluated with the introduction of 100 mM EDTA to the standard reaction conditions.

[0187] FIG. 21 depicts a denaturing gel displaying LwaCas13a at a final concentration of 100 nM processing of pre-crRNA (200 nM) without the presence of EDTA, and under reaction conditions supplemented with increasing concentrations of EDTA (3.3-100 mM).

[0188] FIGS. 22A and 22B depict a titration of Apo EsCas13d and RspCas13d (100-0.4 nM) over a non-targeted ssDNA substrate (100 nM).

[0189] FIGS. 23A and 23B depict a titration of EsCas13d and RspCas13d in complex with crRNA (100-0.4 nM) over non-targeted ssDNA substrates (100 nM).

[0190] FIGS. 24A and 24B depict a titration of EsCas13d and RspCas13d in complex with crRNA (100-0.4 nM) over targeted ssDNA substrates (100 nM). Saturation of target cleavage activity was observed at approx. 50 nM RspCas13d-crRNA complex and 100 nM EsCas13d-crRNA complex.

[0191] FIGS. 25A and 25B depict representative denaturing gels displaying the targeted RNase activity of EsCas13d and RspCas13d effector proteins, with substrate RNA cleavage occurring when the crRNA matches its complementary target ssRNA. RNA substrates are 5′ labeled with IRDye 800.

[0192] FIGS. 26A and 26B depict representative denaturing gels displaying non-specific RNase activity of the Cas13d effectors upon targeted substrate recognition, demonstrated by the cleavage of fluorescein dUTP body-labeled collateral RNA upon activation of the target nuclease activity. For all reactions, EsCas13d-crRNA and RspCas13d-crRNA complexes were formed by pre-incubating Cas13d and cognate crRNA for 5 minutes at 37° C., prior to adding target and/or collateral ssRNA and incubating the reaction for 30 minutes.

[0193] FIGS. 26C and 26D depict denaturing gels displaying cleavage reactions of the Cas13d-crRNA complex over two distinct ssRNA substrates, short 150 nt target RNAs (top) and longer 800 nt fluorescent body-labeled ssRNA substrates (bottom) for EsCas13d and RspCas13d. The labels A and B correspond to matching crRNA/substrate pairs.

[0194] FIG. 27A depicts a comparative depletion plot of bacterial screens performed on RspCas13d only (solid line, long dashes) versus RspCas13d with RspWYL1 (short and medium dashes). The dashed vertical lines demarcate the intersection of the ranked screen hits with the depletion fraction of 0.1, below which we define as strongly depleted.

[0195] FIG. 27B depicts spacer depletion ratios for RspCas13d with and without RspWYL1.

[0196] FIG. 28 depicts a depletion plot of bacterial screens using only RspWYL1 and the repeat-spacer-repeat library associated with RspCas13d.

[0197] FIGS. 29A and 29B depict representative activity of titrating different molar ratios of purified RspWYL1 to a fixed dose of RspCas13d. FIG. 29A is an ssRNA substrate cleavage assay, and FIG. 29B evaluate the effect of RspWYL1 on collateral activity.

[0198] FIG. 29C depicts the effect on RNA cleavage of titrating RspWYL1 (800 to 0.4 nM) while holding fixed the concentration of Apo RspCas13d (200 nM) for target ssRNA.

[0199] FIG. 29D depicts the effect on RNA cleavage of titrating RspWYL1 (800 to 0.4 nM) while holding fixed the concentration of Apo RspCas13d (200 nM) for collateral ssRNA activity.

[0200] FIG. 29E depicts the effect on RNA cleavage of titrating RspWYL1 (800 to 0.4 nM) while holding fixed the concentration of RspCas13d-crRNA complex (50 nM) for target ssRNA.

[0201] FIG. 29F depicts the effect on RNA cleavage of titrating RspWYL1 (800 to 0.4 nM) while holding fixed the concentration of RspCas13d-crRNA complex (50 nM) for collateral ssRNA activity.

[0202] FIGS. 30A and 30B depict representative activity of titrating different molar ratios of purified RspWYL1 to a fixed dose of EsCas13d. FIG. 30A is an ssRNA substrate cleavage assay, and FIG. 30B evaluate the effect of RspWYL1 on collateral activity of EsCas13d. In both of these reactions, RspWYL1 was pre-incubated along with the pre-crRNA and Cas13d effector for 5 minutes at 37° C. before incubation with substrate RNA. The final concentration of Cas13d in the reaction is 33 nM with a 2:1 ratio of Cas13d to pre-crRNA.

[0203] FIG. 31 shows that RspWYL1 enhances the activity of type VI-B effector BzCas13b. Representative gel displaying the ability of RspWYL1 to enhance target cleavage and collateral activity for Cas13 enzymes of subtype VI-B, demonstrating modularity beyond Type VI-D. In this reaction RspWYL1 was pre-incubated along with the pre-crRNA and BzCas13b effector for 5 minutes at 37 C before incubation with substrate RNA.

[0204] FIGS. 32A and 32B show that EsCas13d and RspCas13d, respectively, are capable of specific detection of RNA species using the collateral effect of the enzymes, and additionally, demonstrate differential activity over short ribonucleotide oligomer substrates. The poly-G and poly-U labels refer to substrates containing 5 identical ribonucleotide bases, with the 5′ end modified with a FAM labeled fluorescent ribonucleotide and the 3′ end modified with an Iowa Black FQ fluorescent quencher. These data were collected 60 minutes after incubation at 37° C. The error bars represent S.E.M. of four technical replicates.

[0205] FIGS. 33A and 33B depict the distribution and magnitude of crRNA depletion for primary screening of EsCas13d and RspCas13d (effector only), respectively, in the absence of tetracycline. The value of crRNA depletion was calculated by normalized sequencing reads from the screen output divided by normalized reads from the pre-transformation screen input library for each crRNA spacer and orientation. The vertical dashed lines demarcate the intersection of the ranked screen hits with the depletion fraction of 0.1, below which we define as strongly depleted.

[0206] FIGS. 34A and 34B depict the location of strongly depleted targets of the active DR orientation over the strands and genetic features of the pACYC184 plasmid for EsCas13d and RspCas13d (effector only), respectively. Light gray outlines represent the total number of spacers (y-axis) targeting a location, while short horizontal bars depict the locations of strongly depleted spacers with heatmap color proportional to magnitude of depletion.

### DETAILED DESCRIPTION

### CRISPR Class 2 RNA-Guided RNases

[0207] In one aspect, provided herein is a novel family of CRISPR Class 2 effectors having two strictly conserved RX4-6H motifs, characteristic of Higher Eukaryotes and Prokaryotes Nucleotide-binding (HEPN) domains. CRISPR Class 2 effectors that contain two HEPN domains have been previously characterized and include, for example, CRISPR Cas13a (C2c2), Cas13b, and Cas13c.

[0208] HEPN domains have been shown to be RNAse domains and confer the ability bind to and cleave any target RNA molecule. In some embodiments, a HEPN domain comprises the amino acid sequence RXXXXH, wherein X is any amino acid (SEQ ID NO: 94). The target RNA may be any suitable form of RNA, including but not limited to mRNA, tRNA, ribosomal RNA, non-coding RNA, lincRNA, and nuclear RNA. For example, in some embodiments, the CRISPR-associated protein recognizes and cleaves targets located on the coding strand of open reading frames (ORFs).

[0209] In one embodiment, the disclosure provides a family of CRISPR Class 2 effectors, referred to herein generally as Type VI-D CRISPR-Cas effector proteins, Cas13d or Cas3. Direct comparison of the Type VI-D CRISPR-Cas effector proteins with the effector of these other systems shows that Type VI-D CRISPR-Cas effector proteins are significantly smaller (e.g., 20% fewer amino acids), and have less than 10% sequence similarity in multiple sequence alignments to other previously described effector proteins. This newly-identified family of CRISPR Class 2 effectors can be used in a variety of applications, and are particularly suitable for therapeutic applications since they are significantly smaller than other effectors (e.g., CRISPR Cas13a, Cas13b, or Cas13c effectors) which allows for the packaging of the effectors and/or nucleic acids encoding the effectors into delivery systems having size limitations.

[0210] In bacteria, the Type VI-D CRISPR-Cas systems include a single effector (approximately 920 amino acids in length), and one or none accessory proteins (approximately 380 amino acids in length) within close proximity to a CRISPR array. The CRISPR array includes direct repeat sequences typically 36 nucleotides in length, which are generally well conserved, especially on the 3′ end which ends with TNTNAAAC (SEQ ID NO: 154). Reduced consensus of the nucleotide sequence in the 5′ end of the direct repeats suggests that the crRNA is processed from the 5′ end. With few exceptions, the 21 nucleotide sequence immediately upstream of the 3′ end TNTNAAAC (SEQ ID NO: 154) starts with a highly conserved A and exhibits sequence complementarity that suggests strong base pairing for an RNA loop structure. The spacers contained in the Cas13d CRISPR arrays are most commonly 30 nucleotides in length, with the majority of variation in length contained in the range of 28 to 36 nucleotides.

[0211] Exemplary Type VI-D CRISPR-Cas effector proteinsare provided below in Table 2 (e.g., SEQ ID NOs. 1-31, and 200-350). In some embodiments, a Type VI-D CRISPR-Cas effector proteins include an amino acid sequence having at least about 80% (e.g., 81%, 82%, 83%, 84%, 85%, 86%, 87% 88%, 89%, 90%, 91%, 92%, 93%, 94%, 95%, 96%, 97%, 98%, 99%, or 100%) identity to the amino acid sequence of any one of Table 2 (e.g., SEQ ID NOs. 1-31, and 200-350). In some embodiments, a Type VI-D CRISPR-Cas effector proteins includes the amino acid sequence of any one of Table 2 (e.g., SEQ ID NOs. 1-31, and 200-350). In some embodiments, the Type VI-D CRISPR-Cas effector proteins is DS499551 (SEQ ID NO: 1; also referred to herein as EsCas13d) or LARF01000048 (SEQ ID NO: 2; also referred to herein as RspCas13d), the amino acid sequences of each are provided below:

>NP_005358205.1 (EsCas13d)
[Eubacterium siraeum DSM 15702]
(SEQ ID NO: 1)
MGKKIHARDLREQRKTDRTEKFADQNKKREAERAVPKKDAAVSVKSVSSV
SSKKDNVTKSMAKAAGVKSVFAVGNTVYMTSFGRGNDAVLEQKIVDTSHE
PLNIDDPAYQLNVVTMNGYSVTGHRGETVSAVTDNPLRRFNGRKKDEPEQ
SVPTDMLCLKPTLEKKFFGKEFDDNIHIQLIYNILDIEKILAVYSTNAIY
ALNNMSADENIENSDFFMKRTTDETFDDFEKKKESTNSREKADFDAFEKF
IGNYRLAYFADAFYVNKKNPKGKAKNVLREDKELYSVLTLIGKLRHWCVH
SEEGRAEFWLYKLDELKDDFKNVLDVVYNRPVEEINNRFIENNKVNIQIL
GSVYKNTDIAELVRSYYEFLITKKYKNMGFSIKKLRESMLEGKGYADKEY
DSVRNKLYQMTDFILYTGYINEDSDRADDLVNTLRSSLKEDDKTTVYCKE
ADYLWKKYRESIREVADALDGDNIKKLSKSNIEIQEDKLRKTFISYADSV
SEFTKLIYLLTRFLSGKEINDLVTTLINKFDNIRSFLEIMDELGLDRTFT
AEYSFFEGSTKYLAELVELNSFVKSCSFDINAKRTMYRDALDILGIESDK
TEEDIEKMIDNILQIDANGDKKLKKNNGLRNFIASNVIDSNRFKYLVRYG
NPKKIRETAKCKPAVRFVLNEIPDAQIERYYEACCPKNTALCSANKRREK
LADMIAEIKFENFSDAGNYQKANVTSRTSEAEIKRKNQAIIRLYLTVMYI
MLKNLVNVNARYVIAFHCVERDTKLYAESGLEVGNIEKNKTNLTMAVMGV
KLENGIIKTEFDKSFAENAANRYLRNARWYKLILDNLKKSERAVVNEFRN
TVCHLNAIRNININIKEIKEVENYFALYHYLIQKHLENRFADKKVERDTG
DFISKLEEHKTYCKDFVKAYCTPFGYNLVRYKNLTIDGLFDKNYPGKDDS
DEQK
>WP_046441786.1 (RspCas13d)
[Ruminococcus sp. N15.MGS-57]
(SEQ ID NO: 2)
MAKKNKMKPRELREAQKKARQLKAAEINNNAAPAIAAMPAAEVIAPVAEK
KKSSVKAAGMKSILVSKNKMYITSFGKGNSAVLEYEVDNNDYNQTQLSSK
GSSNIELRGVNEVNITFSSKHGFESGVEINTSNPTHRSGESSPVRGDMLG
LKSELEKRFFGKTFDDNIHIQLIYNILDIEKILAVYVTNIVYALNNMLSI
KDSESYDDFMGYLSARNTYEVFTHPDKSNLSDKAKGNIKKSFSTENDLLK
TKRLGYFGLEEPKTKDTRVSQAYKKRVYHMLAIVGQIRQSVFHDKSSKLD
EDLYSFIDIIDSEYRETLDYLVDERFDSINKGFIQGNKVNISLLIDMMKG
YEADDIIRLYYDFIVLKSQKNLGFSIKKLREKMLDEYGFRFKDKQYDSVR
SKMYKLMDFLLFCNYYRNDVVAGEALVRKLRFSMTDDEKEGIYADEASKL
WGKERNDFENIADHMNGDVIKELGKADMDFDEKILDSEKKNASDLLYFSK
MIYMLTYFLDGKEINDLLTTLISKFDNIKEFLKIMKSSAVDVECELTAGY
KLENDSQRITNELFIVKNIASMRKPASSAKLTMERDALTILGIDDNITDD
RISEILKLKEKGKGIHGLRNFITNNVIESSREVYLIKYANAQKIRKVAKN
EKVVMFVLGGIPDTQIERYYKSCVEFPDMNSSLEVKRSELARMIKNISFD
DFKNVKQQAKGRENVAKERAKAVIGLYLTVMYLLVKNLVNVNARYVIAIH
CLERDFGLYKEIIPELASKNLKNDYRILSQTLCELCDKSPNLFLKKNERL
RKCVEVDINNADSSMTRKYRNCIAHLTVVRELKEYIGDIRTVDSYFSIYH
YVMQRCITKRENDTKQEEKIKYEDDLLKNHGYTKDFVKALNSPFGYNIPR
FKNLSIEQLFDRNEYLTEK

[0212] In some embodiments, the CRISPR-associated proteins described herein (e.g., Type VI-D CRISPR-Cas effector proteins) are from about 800 to about 1150 amino acids long, such as about 850 to about 1100 amino acids in length, e.g., about 850 to about 1050, about 850 to about 1000 amino acids long, or about 850 to about 950 amino acids long.

[0213] In some embodiments, the CRISPR-associated proteins (e.g., Type VI-D CRISPR-Cas effector proteins) have RNAse activity (e.g., collateral RNAse activity). In some embodiments, the CRISPR-associated proteins have DNAse activity. In some embodiments, the DNAse and/or RNAse activity is mediated by a single or both HEPN domains present in the CRISPR-associated proteins.

[0214] In some embodiments, a CRISPR-associated protein (e.g., Type VI-D CRISPR-Cas effector protein) is derived from a Ruminococcus or Eubacterium bacterium. In some embodiments, the CRISPR associated protein is derived from a human stool sample bacterial source.

[0215] Collateral RNase Activity

[0216] In some embodiments, a complex comprised of (but not limited to) a CRISPR-associated protein and a crRNA is activated upon binding to a target nucleic acid (e.g., a target RNA). Activation induces a conformational change, which results in the complex acting as a non-specific RNase, cleaving and/or degrading nearby RNA molecules (e.g., ssRNA or dsRNA molecules) (i.e., “collateral” effects).

[0217] Collateral-Free RNA Cleavage

[0218] In other embodiments, a complex comprised of (but not limited to) the CRISPR-associated protein and a crRNA does not exhibit collateral RNase activity subsequent to target recognition. This “collateral-free” embodiment may comprise wild-type or engineered effector proteins.

[0219] PAM/PFS-Independent Targeting

[0220] In some embodiments, a CRISPR-associated protein (e.g., a Type VI-D CRISPR-Cas effector protein described herein) recognizes and cleaves the target nucleic acid without any additional requirements adjacent to or flanking the protospacer (i.e., protospacer adjacent motif “PAM” or protospacer flanking sequence “PFS” requirements).

[0221] Deactivated/Inactivated CRISPR-Associated Proteins

[0222] Where the CRISPR-associated proteins described herein have nuclease activity, the CRISPR-associated proteins can be modified to have diminished nuclease activity, e.g., nuclease inactivation of at least 50%, at least 60%, at least 70%, at least 80%, at least 90%, at least 95%, at least 97%, or 100% as compared with the wild type CRISPR-associated proteins. The nuclease activity can be diminished by several methods known in the art, e.g., introducing mutations into the nuclease domains of the proteins. In some embodiments, catalytic residues for the nuclease activities are identified, and these amino acid residues can be substituted by different amino acid residues (e.g., glycine or alanine) to diminish the nuclease activity. In some embodiments, the amino acid substitution is a conservative amino acid substitution. In some embodiments, the amino acid substitution is a non-conservative amino acid substitution.

[0223] In some embodiments, the CRISPR-associated proteins described herein (e.g., a Type VI-D CRISPR-Cas effector protein) are modified to comprise one or more mutations (e.g., amino acid deletions, insertions, or substitutions) in at least one HEPN domain. In some embodiments, the CRISPR associate protein includes one, two, three, four, five, six, seven, eight, nine, or more amino acid substitutions in at least one HEPN domain. For example, in some embodiments, the one or more mutations comprise a substitution (e.g., an alanine substitution) at an amino acid residue corresponding to R295, H300, R849, H854 of SEQ ID NO: 1, or R288, H293, R820, or H825 of SEQ ID NO: 2. The presence of at least one of these mutations results in a CRISPR-associated protein having reduced nuclease activity (e.g., RNAse activity) as compared to the nuclease activity of the CRISPR-associated protein from which the protein was derived (i.e., lacking the mutation).

[0224] The inactivated CRISPR-associated proteins can be fused or associated with one or more functional domains (e.g., via fusion protein, linker peptides, “GS” linkers, etc.). These functional domains can have various activities, e.g., methylase activity, demethylase activity, transcription activation activity, transcription repression activity, transcription release factor activity, histone modification activity, RNA cleavage activity, DNA cleavage activity, nucleic acid binding activity, base-editing activity, and switch activity (e.g., light inducible). In some embodiments, the functional domains are Kruppel associated box (KRAB), VP64, VP16, Fok1, P65, HSF1, MyoD1, Adenosine Deaminase Acting on RNA (ADAR) 1, ADAR2, APOBEC, cytidine deaminase (AID), mini-SOG, APEX, and biotin-APEX. In some embodiments, the functional domain is a base editing domain (e.g., ADAR1, ADAR2, APOBEC, or AID). In some embodiments, the CRISPR-associated protein is fused to one functional domain. In some embodiments, the CRISPR-associated protein is fused to multiple (e.g., two, three, four, five, six, seven, eight, or more) functional domains. In some embodiments, the functional domain (e.g., a base editing domain) is further fused to an RNA-binding domain (e.g., MS2). In some embodiments, the CRISPR-associated protein is associated to or fused to a functional domain via a linker sequence (e.g., a flexible linker sequence or a rigid linker sequence). Exemplary linker sequences and functional domain sequences are provided in Table 10.

[0225] The positioning of the one or more functional domains on the inactivated CRISPR-associated proteins is one that allows for correct spatial orientation for the functional domain to affect the target with the attributed functional effect. For example, if the functional domain is a transcription activator (e.g., VP16, VP64, or p65), the transcription activator is placed in a spatial orientation that allows it to affect the transcription of the target. Likewise, a transcription repressor is positioned to affect the transcription of the target, and a nuclease (e.g., Fok1) is positioned to cleave or partially cleave the target. In some embodiments, the functional domain is positioned at the N-terminus of the CRISPR-associated protein. In some embodiments, the functional domain is positioned at the C-terminus of the CRISPR-associated protein. In some embodiments, the inactivated CRISPR-associated protein is modified to comprise a first functional domain at the N-terminus and a second functional domain at the C-terminus.

[0226] Various examples of inactivated CRISPR-associated proteins fused with one or more functional domains and methods of using the same are described, e.g., in International Publication No. WO 2017/219027, which is incorporated herein by reference in its entirety, and in particular with respect to the features described herein.

[0227] Split Enzymes

[0228] The present disclosure also provides a split version of the CRISPR-associated proteins described herein (e.g., a Type VI-D CRISPR-Cas effector protein). The split version of the CRISPR-associated protein may be advantageous for delivery. In some embodiments, the CRISPR-associated proteins are split into two parts of the enzyme, which together substantially comprise a functioning CRISPR-associated protein.

[0229] The split can be done in a way that the catalytic domain(s) are unaffected. The CRISPR-associated protein may function as a nuclease or may be an inactivated enzyme, which is essentially a RNA-binding protein with very little or no catalytic activity (e.g., due to mutation(s) in its catalytic domains). Split enzymes are described, e.g., in Wright, Addison V., et al. “Rational design of a split-Cas9 enzyme complex,” Proc. Nat'l. Acad. Sci., 112.10 (2015): 2984-2989, which is incorporated herein by reference in its entirety.

[0230] In some embodiments, the nuclease lobe and α-helical lobe are expressed as separate polypeptides. Although the lobes do not interact on their own, the crRNA recruits them into a ternary complex that recapitulates the activity of full-length CRISPR-associated proteins and catalyzes site-specific DNA cleavage. The use of a modified crRNA abrogates split-enzyme activity by preventing dimerization, allowing for the development of an inducible dimerization system.

[0231] In some embodiments, the split CRISPR-associated protein can be fused to a dimerization partner, e.g., by employing rapamycin sensitive dimerization domains. This allows the generation of a chemically inducible CRISPR-associated protein for temporal control of the activity of the protein. The CRISPR-associated protein can thus be rendered chemically inducible by being split into two fragments and rapamycin-sensitive dimerization domains can be used for controlled re-assembly of the protein.

[0232] The split point is typically designed in silico and cloned into the constructs. During this process, mutations can be introduced to the split CRISPR-associated protein and non-functional domains can be removed. In some embodiments, the two parts or fragments of the split CRISPR-associated protein (i.e., the N-terminal and C-terminal fragments), can form a full CRISPR-associated protein, comprising, e.g., at least 70%, at least 80%, at least 90%, at least 95%, or at least 99% of the sequence of the wild-type CRISPR-associated protein.

[0233] Self-Activating or Inactivating Enzymes

[0234] The CRISPR-associated proteins described herein (e.g., a Type VI-D CRISPR-Cas effector protein) can be designed to be self-activating or self-inactivating. For example, the target sequence can be introduced into the coding construct of the CRISPR-associated protein. Thus, the CRISPR-associated protein can cleave the target sequence, as well as the construct encoding the protein thereby self-inactivating their expression. Methods of constructing a self-inactivating CRISPR system are described, e.g., in Epstein, and Schaffer, Mol. Ther. 24 (2016): S50, which is incorporated herein by reference in its entirety.

[0235] In some other embodiments, an additional crRNA, expressed under the control of a weak promoter (e.g., 7SK promoter), can target the nucleic acid sequence encoding the CRISPR-associated protein to prevent and/or block its expression (e.g., by preventing the transcription and/or translation of the nucleic acid). The transfection of cells with vectors expressing the CRISPR-associated protein, the crRNAs, and crRNAs that target the nucleic acid encoding the CRISPR-associated protein can lead to efficient disruption of the nucleic acid encoding the CRISPR-associated protein and decrease the levels of CRISPR-associated protein, thereby limiting the genome editing activity.

[0236] In some embodiments, the genome editing activity of the CRISPR-associated protein can be modulated through endogenous RNA signatures (e.g., miRNA) in mammalian cells. A CRISPR-associated protein switch can be made by using a miRNA-complementary sequence in the 5′-UTR of mRNA encoding the CRISPR-associated protein. The switches selectively and efficiently respond to miRNA in the target cells. Thus, the switches can differentially control the genome editing by sensing endogenous miRNA activities within a heterogeneous cell population. Therefore, the switch systems can provide a framework for cell-type selective genome editing and cell engineering based on intracellular miRNA information (see, e.g., Hirosawa et al. Nucl. Acids Res., 2017, 45(13): e118).

[0237] Inducible CRISPR-Associated Proteins

[0238] The CRISPR-associated proteins (e.g., Type VI-D CRISPR-Cas effector proteins) can be inducibly expressed, e.g., their expression can be light-induced or chemically-induced. This mechanism allows for activation of the functional domain in the CRISPR-associated proteins. Light inducibility can be achieved by various methods known in the art, e.g., by designing a fusion complex wherein CRY2 PHR/CIBN pairing is used in split CRISPR-associated proteins (see, e.g., Konermann et al. “Optical control of mammalian endogenous transcription and epigenetic states,” Nature, 500.7463 (2013): 472). Chemical inducibility can be achieved, e.g., by designing a fusion complex wherein FKBP/FRB (FK506 binding protein/FKBP rapamycin binding domain) pairing is used in split CRISPR-associated proteins. Rapamycin is required for forming the fusion complex, thereby activating the CRISPR-associated proteins (see, e.g., Zetsche, Volz, and Zhang, “A split-Cas9 architecture for inducible genome editing and transcription modulation,” Nature Biotech., 33.2 (2015): 139-142).

[0239] Furthermore, expression of the CRISPR-associated proteins can be modulated by inducible promoters, e.g., tetracycline or doxycycline controlled transcriptional activation (Tet-On and Tet-Off expression system), hormone inducible gene expression system (e.g., an ecdysone inducible gene expression system), and an arabinose-inducible gene expression system. When delivered as RNA, expression of the RNA targeting effector protein can be modulated via a riboswitch, which can sense a small molecule like tetracycline (see, e.g., Goldfless, Stephen J. et al. “Direct and specific chemical control of eukaryotic translation with a synthetic RNA-protein interaction,” Nucl Acids Res., 40.9 (2012): e64-e64).

[0240] Various embodiments of inducible CRISPR-associated proteins and inducible CRISPR systems are described, e.g., in U.S. Pat. No. 8,871,445, US Publication No. 2016/0208243, and International Publication No. WO 2016/205764, each of which is incorporated herein by reference in its entirety.

### Functional Mutations

[0241] In some embodiments, the CRISPR-associated proteins include at least one (e.g., 1, 2, 3, 4, 5, 6, 7, 8, 9, or 10) Nuclear Localization Signal (NLS) attached to the N-terminal or C-terminal of the protein. Non-limiting examples of NLSs include an NLS sequence derived from: the NLS of the SV40 virus large T-antigen, having the amino acid sequence PKKKRKV (SEQ ID NO: 135); the NLS from nucleoplasmin (e.g., the nucleoplasmin bipartite NLS with the sequence KRPAATKKAGQAKKKK (SEQ ID NO: 136)); the c-myc NLS having the amino acid sequence PAAKRVKLD (SEQ ID NO: 137) or RQRRNELKRSP (SEQ ID NO: 138); the hRNPA1 M9 NLS having the sequence NQSSNFGPMKGGNFGGRSSGPYGGGGQYFAKPRNQGGY (SEQ ID NO: 139); the sequence RMRIZFKNKGKDTAELRRRRVEVSVELRKAKKDEQILKRRNV (SEQ ID NO: 140) of the IBB domain from importin-alpha; the sequences VSRKRPRP (SEQ ID NO: 141) and PPKKARED (SEQ ID NO: 142) of the myoma T protein; the sequence PQPKKKPL (SEQ ID NO: 143) of human p53; the sequence SALIKKKKKMAP (SEQ ID NO: 144) of mouse c-abl IV; the sequences DRLRR (SEQ ID NO: 145) and PKQKKRK (SEQ ID NO: 146) of the influenza virus NS1; the sequence RKLKKKIKKL (SEQ ID NO: 147) of the Hepatitis virus delta antigen; the sequence REKKKFLKRR (SEQ ID NO: 148) of the mouse Mx1 protein; the sequence KRKGDEVDGVDEVAKKKSKK (SEQ ID NO: 149) of the human poly(ADP-ribose) polymerase; and the sequence RKCLQAGMNLEARKTKK (SEQ ID NO: 150) of the human glucocorticoid receptor. In some embodiments, the CRISPR-associated protein includes at least one (e.g., 1, 2, 3, 4, 5, 6, 7, 8, 9, or 10) Nuclear Export Signal (NES) attached the N-terminal or C-terminal of the protein. In a preferred embodiment a C-terminal and/or N-terminal NLS or NES is attached for optimal expression and nuclear targeting in eukaryotic cells, e.g., human cells.

[0242] In some embodiments, the CRISPR-associated proteins described herein are mutated at one or more amino acid residues to alter one or more functional activities. For example, in some embodiments, the CRISPR-associated protein is mutated at one or more amino acid residues to alter its helicase activity. In some embodiments, the CRISPR-associated protein is mutated at one or more amino acid residues to alter its nuclease activity (e.g., endonuclease activity or exonuclease activity). In some embodiments, the CRISPR-associated protein is mutated at one or more amino acid residues to alter its ability to functionally associate with an RNA guide. In some embodiments, the CRISPR-associated protein is mutated at one or more amino acid residues to alter its ability to functionally associate with a target nucleic acid.

[0243] In some embodiments, the CRISPR-associated proteins described herein are capable of cleaving a target nucleic acid molecule. In some embodiments, the CRISPR-associated protein cleaves both strands of the target nucleic acid molecule. However, in some embodiments, the CRISPR-associated protein is mutated at one or more amino acid residues to alter its cleaving activity. For example, in some embodiments, the CRISPR-associated protein may comprise one or more mutations that render the enzyme incapable of cleaving a target nucleic acid. In other embodiments, the CRISPR-associated protein comprise one or more mutations such that the enzyme is capable of cleaving a single strand of the target nucleic acid (i.e., nickase activity). In some embodiments, the CRISPR-associated protein is capable of cleaving the strand of the target nucleic acid that is complementary to the strand to which the RNA guide hybridizes. In some embodiments, the CRISPR-associated protein is capable of cleaving the strand of the target nucleic acid to which the guide RNA hybridizes.

[0244] In some embodiments, a CRISPR-associated protein described herein can be engineered to have a deletion in one or more amino acid residues to reduce the size of the enzyme while retaining one or more desired functional activities (e.g., nuclease activity and the ability to interact functionally with a RNA guide). The truncated CRISPR-associated protein can be advantageously used in combination with delivery systems having load limitations.

[0245] Nucleic acids encoding the proteins (e.g., a CRISPR-associated protein or an accessory protein) and RNA guides (e.g., a crRNA) described herein are also provided. In some embodiments, the nucleic acid is a synthetic nucleic acid. In some embodiments, the nucleic acid is a DNA molecule. In some embodiments, the nucleic acid is an RNA molecule (e.g., an mRNA molecule). In some embodiments, the nucleic acid is an mRNA. In some embodiments, the mRNA is capped, polyadenylated, substituted with 5-methylcytidine, substituted with pseudouridine, or a combination thereof. In some embodiments, the nucleic acid (e.g., DNA) is operably linked to a regulatory element (e.g., a promoter) in order to control the expression of the nucleic acid. In some embodiments, the promoter is a constitutive promoter. In some embodiments, the promoter is an inducible promoter. In some embodiments, the promoter is a cell-specific promoter. In some embodiments, the promoter is an organism-specific promoter. Suitable promoters are known in the art and include, for example, a pol I promoter, a pol II promoter, a pol III promoter, a T7 promoter, a U6 promoter, a H1 promoter, retroviral Rous sarcoma virus LTR promoter, a cytomegalovirus (CMV) promoter, a SV40 promoter, a dihydrofolate reductase promoter, and a β-actin promoter. For example, a U6 promoter can be used to regulate the expression of an RNA guide molecule described herein.

[0246] In some embodiments, the nucleic acid(s) are present in a vector (e.g., a viral vector or a phage). The vectors can include one or more regulatory elements that allow for the propagation of the vector in a cell of interest (e.g., a bacterial cell or a mammalian cell). In some embodiments, the vector includes a nucleic acid encoding a single component of a CRISPR-associated (Cas) system described herein. In some embodiments, the vector includes multiple nucleic acids, each encoding a component of a CRISPR-associated (Cas) system described herein.

[0247] In one aspect, the present disclosure provides nucleic acid sequences that are at least 50%, 55%, 60%, 65%, 70%, 75%, 80%, 85%, 90%, 91%, 92%, 93%, 94%, 95%, 96%, 97%, 98%, 99%, or 100% identical to the nucleic acid sequences described herein. In another aspect, the present disclosure also provides amino acid sequences that are at least 50%, 55%, 60%, 65%, 70%, 75%, 80%, 85%, 90%, 91%, 92%, 93%, 94%, 95%, 96%, 97%, 98%, 99%, or 100% identical to the amino acid sequences described herein.

[0248] In some embodiments, the nucleic acid sequences have at least a portion (e.g., at least 1, 2, 3, 4, 5, 6, 7, 8, 9, 10, 11, 12, 13, 14, 15, 20, 30, 40, 50, 60, 70, 80, 90, or 100 nucleotides, e.g., contiguous or non-contiguous nucleotides) that is the same as the sequences described herein. In some embodiments, the nucleic acid sequences have at least a portion (e.g., at least 1, 2, 3, 4, 5, 6, 7, 8, 9, 10, 11, 12, 13, 14, 15, 20, 30, 40, 50, 60, 70, 80, 90, or 100 nucleotides, e.g., contiguous or non-contiguous nucleotides) that is different from the sequences described herein.

[0249] In some embodiments, the amino acid sequences have at least a portion (e.g., at least 1, 2, 3, 4, 5, 6, 7, 8, 9, 10, 11, 12, 13, 14, 15, 20, 30, 40, 50, 60, 70, 80, 90, or 100 amino acid residues, e.g., contiguous or non-contiguous amino acid residues) that is the same as the sequences described herein. In some embodiments, the amino acid sequences have at least a portion (e.g., at least 1, 2, 3, 4, 5, 6, 7, 8, 9, 10, 11, 12, 13, 14, 15, 20, 30, 40, 50, 60, 70, 80, 90, or 100 amino acid residues, e.g., contiguous or non-contiguous amino acid residues) that is different from the sequences described herein.

[0250] To determine the percent identity of two amino acid sequences, or of two nucleic acid sequences, the sequences are aligned for optimal comparison purposes (e.g., gaps can be introduced in one or both of a first and a second amino acid or nucleic acid sequence for optimal alignment and non-homologous sequences can be disregarded for comparison purposes). In general, the length of a reference sequence aligned for comparison purposes should be at least 80% of the length of the reference sequence, and in some embodiments is at least 90%, 95%, or 100% of the length of the reference sequence. The amino acid residues or nucleotides at corresponding amino acid positions or nucleotide positions are then compared. When a position in the first sequence is occupied by the same amino acid residue or nucleotide as the corresponding position in the second sequence, then the molecules are identical at that position. The percent identity between the two sequences is a function of the number of identical positions shared by the sequences, taking into account the number of gaps, and the length of each gap, which need to be introduced for optimal alignment of the two sequences. For purposes of the present disclosure, the comparison of sequences and determination of percent identity between two sequences can be accomplished using a Blossum 62 scoring matrix with a gap penalty of 12, a gap extend penalty of 4, and a frameshift gap penalty of 5.

[0251] In some embodiments, the CRISPR-associated proteins and accessory proteins described herein can be fused to one or more peptide tags, including a His-tag, GST-tag, or myc-tag. In some embodiments, the CRISPR-associated proteins or accessory proteins described herein can be fused to a detectable moiety such as a fluorescent protein (e.g., green fluorescent protein or yellow fluorescent protein).

[0252] The proteins described herein (e.g., CRISPR-associated proteins or accessory proteins) can be delivered or used as either nucleic acid molecules or polypeptides. When nucleic acid molecules are used, the nucleic acid molecule encoding the CRISPR-associated proteins can be codon-optimized. The nucleic acid can be codon optimized for use in any organism of interest, in particular human cells or bacteria. For example, the nucleic acid can be codon-optimized for any non-human eukaryote including mice, rats, rabbits, dogs, livestock, or non-human primates. Codon usage tables are readily available, for example, at the “Codon Usage Database” available at www.kazusa.orjp/codon/ and these tables can be adapted in a number of ways. See Nakamura et al. Nucl Acids Res. 28:292 (2000), which is incorporated herein by reference in its entirety. Computer algorithms for codon optimizing a particular sequence for expression in a particular host cell are also available, such as Gene Forge (Aptagen; Jacobus, Pa.).

### RNA Guides

[0253] In some embodiments, the CRISPR systems described herein include at least RNA guide (e.g., a crRNA). The architecture of multiple RNA guides is known in the art (see, e.g., International Publication Nos. WO 2014/093622 and WO 2015/070083, the entire contents of each of which are incorporated herein by reference). In some embodiments, the CRISPR systems described herein include multiple RNA guides (e.g., one, two, three, four, five, six, seven, eight, or more RNA guides). In some embodiments, the RNA guide includes a crRNA. In some embodiments, the RNA guide includes a crRNA and a tracrRNA. In some embodiments, the RNA guide is an engineered construct that includes a tracrRNA and a crRNA (in a single RNA guide). Sequences for RNA guides from multiple CRISPR systems are known in the art and can be searched using public databases (see, e.g., Grissa et al. (2007) Nucleic Acids Res. 35 (web server issue): W52-7; Grissa et al. (2007) BMC Bioinformatics 8: 172; Grissa et al. (2008) Nucleic Acids Res. 36 (web server issue): W145-8; and Moller and Liang (2017) PeerJ 5: e3788; see also the CRISPR database available at: crispr.i2bc.paris-saclay.fr/crispr/BLAST/CRISPRsBlast.php; and MetaCRAST available at: github.com/molleraj/MetaCRAST).

[0254] In some embodiments, the CRISPR systems described herein include at least one crRNA or a nucleic acid encoding at least one crRNA. In some embodiments, the crRNA includes a direct repeat sequence, a spacer sequence, and a direct repeat sequence, which is typical of precursor crRNA (pre-crRNA) configurations in other CRISPR systems. In some embodiments, the crRNA includes a truncated direct repeat sequence and a spacer sequence, which is typical of processed or mature crRNA. The CRISPR-associated protein is capable of cleaving pre-crRNA to form processed or mature crRNA. The CRISPR-associated protein forms a complex with the mature crRNA, and the spacer sequence directs the complex to a sequence-specific binding with the target nucleic acid that is complementary to the spacer sequence. The resulting complex comprises the CRISPR-associated protein and the mature crRNA bound to the target RNA.

[0255] In some embodiments, the CRISPR systems described herein include a mature crRNA. In some embodiments, the CRISPR systems described herein include a pre-crRNA.

[0256] In some embodiments, the CRISPR systems described herein include a plurality of crRNAs (e.g., 2, 3, 4, 5, 10, 15, or more) or a plurality of nucleic acids encoding a plurality of crRNAs. Generally, the crRNAs described herein include a direct repeat sequence and a spacer sequence. In certain embodiments, the crRNA includes, consists essentially of, or consists of a direct repeat sequence linked to a guide sequence or spacer sequence.

[0257] In some embodiments, the CRISPR system described herein includes an RNA guide (e.g., a crRNA) or a nucleic acid encoding the RNA guide. In some embodiments, the RNA guide comprises or consists of a direct repeat sequence and a spacer sequence capable of hybridizing (e.g., hybridizes under appropriate conditions) to a target nucleic acid, wherein the direct repeat sequence comprises 5′-X₁X₂X₃X₄TX₅TX₆AAAC-3′ (SEQ ID NO: 151) at the 3′ terminal end of the RNA guide, and wherein X₁ is A or C or G, X₂ is G or T, X₃ is A or G, X₄ is C or G or T, X₅ is C or T, and X₆ is A or G. In some embodiments, the RNA guide comprises or consists of a direct repeat sequence and a spacer sequence capable of hybridizing (e.g., hybridizes under appropriate conditions) to a target nucleic acid, wherein the direct repeat sequence comprises 5′-X₁X₂X₃X₄TX₅TX₆AAAC-3′ (SEQ ID NO: 199) at the 3′ terminal end of the RNA guide, and wherein X₁ is A or C or G, X₂ is A or G or T, X₃ is A or G or T, X₄ is C or G or T, X₅ is C or T, and X₆ is A or G.

[0258] Exemplary RNA guide direct repeat sequences and effector protein pairs are provided in Table 3. In some embodiments, the direct repeat sequence comprises or consists of a nucleic acid sequence listed in Table 3 (e.g., SEQ ID NOs 32-49, 52-77, 351-589). In some embodiments, the direct repeat sequence comprises or consists of a nucleic acid having a nucleic acid sequence listed in Table 3 with a truncation of the initial three 5′ nucleotides. In some embodiments, the direct repeat sequence comprises or consists of a nucleic acid having a nucleic acid sequence listed in Table 3 with a truncation of the initial four 5′ nucleotides. In some embodiments, the direct repeat sequence comprises or consists of a nucleic acid having a nucleic acid sequence listed in Table 3 with a truncation of the initial five 5′ nucleotides. In some embodiments, the direct repeat sequence comprises or consists of a nucleic acid having a nucleic acid sequence listed in Table 3 with a truncation of the initial six 5′ nucleotides. In some embodiments, the direct repeat sequence comprises or consists of a nucleic acid having a nucleic acid sequence listed in Table 3 with a truncation of the initial seven 5′ nucleotides. In some embodiments, the direct repeat sequence comprises or consists of a nucleic acid having a nucleic acid sequence listed in Table 3 with a truncation of the initial eight 5′ nucleotides.

[0259] In some embodiments, the direct repeat sequence comprises or consists of the nucleic acid sequence 5′-GAACTACACCCGTGCAAAATTGCAGGGGTCTAAAAC-3′ (SEQ ID NO: 34) or 5′-CTACTACACTGGTGCAAATTTGCACTAGTCTAAAAC-3′ (SEQ ID NO: 72). In some embodiments, the direct repeat sequence comprises or consists of the nucleic acid sequence 5′-CACCCGTGCAAAATTGCAGGGGTCTAAAAC-3′ (SEQ ID NO: 152) or 5′-CACTGGTGCAAATTTGCACTAGTCTAAAAC-3′ (SEQ ID NO: 153).

[0260] In some embodiments, the CRISPR-associated protein comprises the amino acid sequence of SEQ ID NO: 1 and the crRNA comprises a direct repeat sequence, wherein the direct repeat sequence comprises or consists of the nucleic acid sequence 5′-GAACTACACCCGTGCAAAATTGCAGGGGTCTAAAAC-3′ (SEQ ID NO: 34) or 5′-CACCCGTGCAAAATTGCAGGGGTCTAAAAC-3′ (SEQ ID NO: 152). In some embodiments, the CRISPR-associated protein comprises the amino acid sequence of SEQ ID NO: 2 and the crRNA comprises a direct repeat sequence, wherein the direct repeat sequence comprises or consists of the nucleic acid sequence 5′-CTACTACACTGGTGCAAATTTGCACTAGTCTAAAAC-3′ (SEQ ID NO: 72) or 5′-CACTGGTGCAAATTTGCACTAGTCTAAAAC-3′ (SEQ ID NO: 153).

[0261] Multiplexing RNA Guides

[0262] Type VI CRISPR-Cas effectors have been demonstrated to employ more than one RNA guide, thus enabling the ability of these effectors, and systems and complexes that include them, to target multiple nucleic acids. In some embodiments, the CRISPR systems described herein include multiple RNA guides (e.g., two, three, four, five, six, seven, eight, nine, ten, fifteen, twenty, thirty, forty, or more) RNA guides. In some embodiments, the CRISPR systems described herein include a single RNA strand or a nucleic acid encoding a single RNA strand, wherein the RNA guides are arranged in tandem. The single RNA strand can include multiple copies of the same RNA guide, multiple copies of distinct RNA guides, or combinations thereof. The processing capability of the Type VI-D CRISPR-Cas effector proteins described herein enables these effectors to be able to target multiple target nucleic acids (e.g., target RNAs) without a loss of activity. In some embodiments, the Type VI-D CRISPR-Cas effector proteins may be delivered in complex with multiple RNA guides directed to different target nucleic acids. In some embodiments, the Type VI-D CRISPR-Cas effector proteins may be co-delivered with multiple RNA guides, each specific for a different target nucleic acid. Methods of multiplexing using CRISPR-associated proteins are described, for example, in U.S. Pat. No. 9,790,490 B2, and EP 3009511 B1, the entire contents of each of which are expressly incorporated herein by reference.

[0263] Spacer Lengths

[0264] The spacer length of crRNAs can range from about 15 to 50 nucleotides. In some embodiments, the spacer length of an RNA guide is at least 16 nucleotides, at least 17 nucleotides, at least 18 nucleotides, at least 19 nucleotides, at least 20 nucleotides, at least 21 nucleotides, or at least 22 nucleotides. In some embodiments, the spacer length is from 15 to 17 nucleotides (e.g., 15, 16, or 17 nucleotides), from 17 to 20 nucleotides (e.g., 17, 18, 19, or 20 nucleotides), from 20 to 24 nucleotides (e.g., 20, 21, 22, 23, or 24 nucleotides), from 23 to 25 nucleotides (e.g., 23, 24, or 25 nucleotides), from 24 to 27 nucleotides, from 27 to 30 nucleotides, from 30 to 45 nucleotides (e.g., 30, 31, 32, 33, 34, 35, 36, 37, 38, 39, 40, 41, 42, 43, 44, or 45 nucleotides), from 30 or 35 to 40 nucleotides, from 41 to 45 nucleotides, from 45 to 50 nucleotides (e.g., 45, 46, 47, 48, 49, or 50 nucleotides), or longer. In some embodiments, the direct repeat length of the RNA guide is at least 16 nucleotides, or is from 16 to 20 nucleotides (e.g., 16, 17, 18, 19, or 20 nucleotides). In some embodiments, the spacer length is from about 15 to about 42 nucleotides. In some embodiments, the direct repeat length of the RNA guide is 19 nucleotides.

[0265] The crRNA sequences can be modified in a manner that allows for formation of a complex between the crRNA and CRISPR-associated protein and successful binding to the target, while at the same time not allowing for successful nuclease activity (i.e., without nuclease activity/without causing indels). These modified guide sequences are referred to as “dead crRNAs,” “dead guides,” or “dead guide sequences.” These dead guides or dead guide sequences may be catalytically inactive or conformationally inactive with regard to nuclease activity. Dead guide sequences are typically shorter than respective guide sequences that result in active RNA cleavage. In some embodiments, dead guides are 5%, 10%, 20%, 30%, 40%, or 50%, shorter than respective RNA guides that have nuclease activity. Dead guide sequences of RNA guides can be from 13 to 15 nucleotides in length (e.g., 13, 14, or 15 nucleotides in length), from 15 to 19 nucleotides in length, or from 17 to 18 nucleotides in length (e.g., 17 nucleotides in length).

[0266] Thus, in one aspect, the disclosure provides non-naturally occurring or engineered CRISPR systems including a functional CRISPR-associated protein as described herein, and a crRNA, wherein the crRNA comprises a dead crRNA sequence whereby the crRNA is capable of hybridizing to a target sequence such that the CRISPR system is directed to a genomic locus of interest in a cell without detectable nuclease activity (e.g., RNAse activity).

[0267] A detailed description of dead guides is described, e.g., in International Publication No. WO 2016/094872, which is incorporated herein by reference in its entirety.

[0268] Inducible Guides

[0269] RNA guides (e.g., crRNAs) can be generated as components of inducible systems. The inducible nature of the systems allows for spatio-temporal control of gene editing or gene expression. In some embodiments, the stimuli for the inducible systems include, e.g., electromagnetic radiation, sound energy, chemical energy, and/or thermal energy.

[0270] In some embodiments, the transcription of RNA guides (e.g., crRNA) can be modulated by inducible promoters, e.g., tetracycline or doxycycline controlled transcriptional activation (Tet-On and Tet-Off expression systems), hormone inducible gene expression systems (e.g., ecdysone inducible gene expression systems), and arabinose-inducible gene expression systems. Other examples of inducible systems include, e.g., small molecule two-hybrid transcription activations systems (FKBP, ABA, etc.), light inducible systems (Phytochrome, LOV domains, or cryptochrome), or Light Inducible Transcriptional Effector (LITE). These inducible systems are described, e.g., in WO 2016205764 and U.S. Pat. No. 8,795,965, both of which are incorporated herein by reference in the entirety.

[0271] Chemical Modifications

[0272] Chemical modifications can be applied to the crRNA's phosphate backbone, sugar, and/or base. Backbone modifications such as phosphorothioates modify the charge on the phosphate backbone and aid in the delivery and nuclease resistance of the oligonucleotide (see, e.g., Eckstein, “Phosphorothioates, essential components of therapeutic oligonucleotides,” Nucl. Acid Ther., 24 (2014), pp. 374-387); modifications of sugars, such as 2′-O-methyl (2′-OMe), 2′-F, and locked nucleic acid (LNA), enhance both base pairing and nuclease resistance (see, e.g., Allerson et al. “Fully 2′-modified oligonucleotide duplexes with improved in vitro potency and stability compared to unmodified small interfering RNA,” J. Med. Chem., 48.4 (2005): 901-904). Chemically modified bases such as 2-thiouridine or N6-methyladenosine, among others, can allow for either stronger or weaker base pairing (see, e.g., Bramsen et al., “Development of therapeutic-grade small interfering RNAs by chemical engineering,” Front. Genet., 2012 Aug. 20; 3:154). Additionally, RNA is amenable to both 5′ and 3′ end conjugations with a variety of functional moieties including fluorescent dyes, polyethylene glycol, or proteins.

[0273] A wide variety of modifications can be applied to chemically synthesized crRNA molecules. For example, modifying an oligonucleotide with a 2′-OMe to improve nuclease resistance can change the binding energy of Watson-Crick base pairing. Furthermore, a 2′-OMe modification can affect how the oligonucleotide interacts with transfection reagents, proteins or any other molecules in the cell. The effects of these modifications can be determined by empirical testing.

[0274] In some embodiments, the crRNA includes one or more phosphorothioate modifications. In some embodiments, the crRNA includes one or more locked nucleic acids for the purpose of enhancing base pairing and/or increasing nuclease resistance.

[0275] A summary of these chemical modifications can be found, e.g., in Kelley et al., “Versatility of chemically synthesized guide RNAs for CRISPR-Cas9 genome editing,” J. Biotechnol. 2016 Sep. 10; 233:74-83; WO 2016205764; and U.S. Pat. No. 8,795,965 B2; each which is incorporated by reference in its entirety.

[0276] Sequence Modifications

[0277] The sequences and the lengths of the RNA guides (e.g., crRNAs) described herein can be optimized. In some embodiments, the optimized length of an RNA guide can be determined by identifying the processed form of crRNA (i.e., a mature crRNA), or by empirical length studies for crRNA tetraloops.

[0278] The crRNAs can also include one or more aptamer sequences. Aptamers are oligonucleotide or peptide molecules have a specific three-dimensional structure and can bind to a specific target molecule. The aptamers can be specific to gene effectors, gene activators, or gene repressors. In some embodiments, the aptamers can be specific to a protein, which in turn is specific to and recruits and/or binds to specific gene effectors, gene activators, or gene repressors. The effectors, activators, or repressors can be present in the form of fusion proteins. In some embodiments, the RNA guide has two or more aptamer sequences that are specific to the same adaptor proteins. In some embodiments, the two or more aptamer sequences are specific to different adaptor proteins. The adaptor proteins can include, e.g., MS2, PP7, Qβ, F2, GA, fr, JP501, M12, R17, BZ13, JP34, JP500, KU1, M11, MX1, TW18, VK, SP, FI, ID2, NL95, TW19, AP205, ϕCb5, ϕCb8r, ϕCb12r, ϕCb23r, 7s, and PRR1.

[0279] Accordingly, in some embodiments, the aptamer is selected from binding proteins specifically binding any one of the adaptor proteins as described herein. In some embodiments, the aptamer sequence is a MS2 binding loop (5′-ggcccAACAUGAGGAUCACCCAUGUCUGCAGgggcc-3′ (SEQ ID NO: 169)). In some embodiments, the apatamer sequence is a QBeta binding loop (5′-ggcccAUGCUGUCUAAGACAGCAUgggcc-3′ (SEQ ID NO: 170)). In some embodiments, the aptamer sequence is a PP7 binding loop (5′-ggcccUAAGGGUUUAUAUGGAAACCCUUAgggcc-3′ (SEQ ID NO: 173)). A detailed description of aptamers can be found, e.g., in Nowak et al., “Guide RNA engineering for versatile Cas9 functionality,” Nucl. Acid. Res., 2016 Nov. 16; 44(20):9555-9564; and WO 2016205764, which are incorporated herein by reference in their entirety.

### Target Nucleic Acids

[0280] The target nucleic acids can be a DNA molecule or a RNA molecule. As described above, in some embodiments, the CRISPR-associated proteins described herein have RNAse activity. Thus, the target nucleic acids can be any RNA molecule of interest, including naturally-occurring and engineered RNA molecules. The target RNA can be an mRNA, a tRNA, a ribosomal RNA (rRNA), a microRNA (miRNA), an interfering RNA (siRNA), a ribozyme, a riboswitch, a satellite RNA, a microswitch, a microzyme, or a viral RNA.

[0281] In some embodiments, the target nucleic acid is associated with a condition or disease (e.g., an infectious disease or a cancer). Thus, in some embodiments, the systems described herein can be used to treat a condition or disease by targeting these nucleic acids. For instance, the target nucleic acid associated with a condition or disease may be an RNA molecule that is overexpressed in a diseased cell (e.g., a cancer or tumor cell). The target nucleic acid may also be a toxic RNA and/or a mutated RNA (e.g., an mRNA molecule having a splicing defect or a mutation). The target nucleic acid may also be an RNA that is specific for a particular microorganism (e.g., a pathogenic bacteria).

[0282] Guide: Target Sequence Matching Requirements

[0283] In classic CRISPR systems, the degree of complementarity between a guide sequence (e.g., a crRNA) and its corresponding target sequence can be about 50%, 60%, 75%, 80%, 85%, 90%, 95%, 97.5%, 99%, or 100%. In some embodiments, the degree of complementarity is 100%. The RNA guides can be about 5, 10, 11, 12, 13, 14, 15, 16, 17, 18, 19, 20, 21, 22, 23, 24, 25, 26, 27, 28, 29, 30, 35, 40, 45, 50, 75, or more nucleotides in length.

[0284] To reduce off-target interactions, e.g., to reduce the guide interacting with a target sequence having low complementarity, mutations can be introduced to the CRISPR systems so that the CRISPR systems can distinguish between target and off-target sequences that have greater than 80%, 85%, 90%, or 95% complementarity. In some embodiments, the degree of complementarity is from 80% to 95%, e.g., about 83%, 84%, 85%, 86%, 87%, 88%, 89%, 90%, 91%, 92%, 93%, 94%, or 95% (for example, distinguishing between a target having 18 nucleotides from an off-target of 18 nucleotides having 1, 2, or 3 mismatches). Accordingly, in some embodiments, the degree of complementarity between a guide sequence and its corresponding target sequence is greater than 94.5%, 95%, 95.5%, 96%, 96.5%, 97%, 97.5%, 98%, 98.5%, 99%, 99.5%, or 99.9%. In some embodiments, the degree of complementarity is 100%.

[0285] It is known in the field that complete complementarity is not required, provided there is sufficient complementarity to be functional. Modulations of cleavage efficiency can be exploited by introduction of mismatches, e.g., one or more mismatches, such as 1 or 2 mismatches between spacer sequence and target sequence, including the position of the mismatch along the spacer/target. The more central (i.e., not at the 3′ or 5′ ends) a mismatch, e.g., a double mismatch, is located; the more cleavage efficiency is affected. Accordingly, by choosing mismatch positions along the spacer sequence, cleavage efficiency can be modulated. For example, if less than 100% cleavage of targets is desired (e.g., in a cell population), 1 or 2 mismatches between spacer and target sequence can be introduced in the spacer sequences.

[0286] Target Nucleic Acids to Regulate Collateral RNAse Activity Activation

[0287] In some embodiments, the CRISPR systems described herein further comprise a target nucleic acid (e.g., a linear or circular nucleic acid) which may advantageously be used to activate the collateral RNAse activity of a Type VI-D CRISPR-Cas effector protein in a controlled manner. By regulating the expression and/or delivery of the target nucleic acid, the activation of the collateral RNAse activity of the effector protein may be controlled. For example, exogenous target nucleic acid may be included in the system to increase the activation rate of the collateral RNAse activity of a Type VI-D CRISPR-Cas effector protein. In some embodiments, the target nucleic acid is a DNA molecule. In some embodiments, the target nucleic acid is an RNA molecule (e.g., a mRNA molecule). In some embodiments, when the target nucleic acid is an RNA, the system includes a DNA molecule (e.g., a plasmid DNA) that codes for the target nucleic acid that is specifically targeted by the Type VI-D CRISPR-Cas effector protein and crRNA complex, operably linked to a promoter. In some embodiments, the promoter is an inducible promoter. In some embodiments, the promoter is a constitutive promoter.

[0288] Accessory Proteins

[0289] In one aspect, the CRISPR systems described herein includes at least one accessory protein. As shown in Example 4, the inventors have surprisingly discovered that the accessory proteins described herein enhance the nuclease activity of CRISPR-associated proteins (e.g., Type VI-D CRISPR-Cas effector proteins) as compared to the nuclease activity of the CRISPR associated protein in the absence of the accessory protein. The ability of the accessory proteins described herein to enhance the nuclease activity of CRISPR-associated proteins is particularly desireable in clinical and therapeutic applications. Therefore, CRISPR systems including at least one accessory protein are provided herein. For example, an accessory protein described herein may be used in combination with CRISPR-associated proteins known in the art in order to enhance their nuclease activity. Alternatively, an accessory protein may be used in combination with a Type VI-D CRISPR-Cas effector protein described herein to enhance its nuclease activity (e.g., collateral RNAse activity or targeted RNAse activity).

[0290] In some embodiments, the accessory protein includes a WYL domain (PFAM: PF13280), which has been predicted to be a ligand-sensing domain, which can regulate CRISPR-Cas systems. WYL domains are SH3 beta-barrel fold containing domains named for three conserved amino acids found in some domains belonging to the WYL-like superfamily. One WYL domain protein, s117009, has been found to be a negative regulator of the Synechocystis sp. I-D CRISPR-Cas system (see, e.g., Hein et al. (2013) RNA Biol. 10: 852-64).

[0291] In some embodiments, the accessory protein includes at least one WYL domain. In some embodiments, the accessory protein includes two WYL domains. In some embodiments, the accessory protein includes a helix-turn-helix (HTH) fold. In some embodiments, the accessory protein includes a ribbon-helix-helix (RHH) fold. In some embodiments, the accessory protein includes at least one WYL domain, wherein the WYL domain comprises the amino acid sequence PXXX₁XXXXXXXXXYL (SEQ ID NO: 198), wherein X₁ is C, V, I, L, P, F, Y, M, or W, and wherein X is any amino acid. In some embodiments, the accessory protein includes at least one WYL domain, wherein the WYL domain comprises the amino acid sequence PXXX₁XXXXXXXXXYL (SEQ ID NO: 198), wherein X₁ is C, V, I, L, P, F, Y, M, or W, and wherein X is any amino acid; and at least one ribbon-ribbon-helix (RHH) fold or at least one helix-turn-helix (HTH) domain. In some embodiments, the amino acid sequence of the WYL domain is separate from (i.e., does not overlap with) an RHH fold or an HTH fold.

[0292] In some embodiments, the accessory proteins describe herein modulate the RNAse activity of a CRISPR-associated protein. In some embodiments, the accessory protein modulates (e.g., increases or decreases) the collateral RNAse activity of a CRISPR-associated protein. In some embodiments, the accessory protein modulates (e.g., increases or decreases) the RNA-binding activity of a CRISPR-associated protein. In some embodiments, the accessory protein modulates (e.g., increases or decreases) the crRNA processing activity of a CRISPR-associated protein. In some embodiments, the accessory protein modulates (e.g., increases or decreases) the targeted RNAse activity of a CRISPR-associated protein.

[0293] In some embodiments, the accessory proteins described herein enhances the RNAse activity of a CRISPR-associated protein (e.g., a Cas13a protein, a Cas13b protein, a Cas13c protein, a Cas12a protein, a Cas9 protein). In some embodiments, the accessory protein enhances the collateral RNAse activity of a CRISPR-associated protein. In some embodiments, the accessory protein enhances the crRNA processing activity of a CRISPR-associated protein. In some embodiments, the accessory protein enhances the RNA-binding activity of a CRISPR-associated protein. In some embodiments, the accessory protein enhances the targeted RNAse activity of a CRISPR-associated protein. CRISPR systems comprising an accessory protein described herein are particularly useful in applications where increased sequence-specific or collateral RNA degradation is desireable. For example, in diagnostic applications, enhanced RNAse activity provides a greater degree of sensitivity, allowing the detection of lower concentrations of a target RNA. In some embodiments, an accessory protein described herein enhances the RNAse activity of the ternary complex of multiple CRISPR Type VI effectors. The ability of the accessory protein to enhance the RNAse of multiple effectors is particularly useful in applications where combinations of Type VI effectors of different sub-types are used together, for example in multi-channel diagnostic applications. In some embodiments, the accessory protein can enhance the RNAse activity of Type VI effectors outside the Cas13d family thereby providing a valuable tool for screening the activity of uncharacterized Type VI effectors.

[0294] Exemplary accessory proteins are provided below in Tables 4, 5 and 6 (e.g., SEQ ID NOs. 78-93, and 590-671). In some embodiments, the accessory proteins include an amino acid sequence having at least about 80% identity (e.g., 81%, 82%, 83%, 84%, 85%, 86%, 87%, 88%, 89%, 90%, 91%, 92%, 93%, 94%, 95%, 96%, 97%, 98%, 99%, or 100% identity) to the amino acid sequence of any one of Tables 4, 5 and 6 (e.g., SEQ ID NOs. 78-93, and 590-671). In some embodiments, the accessory protein includes the amino acid sequence of any one of the proteins in Tables 4, 5 and 6 (e.g., SEQ ID NOs. 78-93, and 590-671). In some embodiments, the accessory protein is RspWYL1 (SEQ ID NO: 81).

### Methods of Using CRISPR Systems

[0295] The CRISPR systems described herein have a wide variety of utilities including modifying (e.g., deleting, inserting, translocating, inactivating, or activating) a target polynucleotide or nucleic acid in a multiplicity of cell types. The CRISPR systems have a broad spectrum of applications in, e.g., DNA/RNA detection (e.g., specific high sensitivity enzymatic reporter unlocking (SHERLOCK)), tracking and labeling of nucleic acids, enrichment assays (extracting desired sequence from background), controlling interfering RNA or miRNA, detecting circulating tumor DNA, preparing next generation library, drug screening, disease diagnosis and prognosis, and treating various genetic disorders.

### DNA/RNA Detection

[0296] In one aspect, the CRISPR systems described herein can be used in DNA or RNA detection. CRISPR-associated proteins can be reprogrammed with CRISPR RNAs (crRNAs) to provide a platform for specific RNA sensing. Upon recognition of its RNA target, activated CRISPR-associated proteins engage in “collateral” cleavage of nearby non-targeted RNAs. This crRNA-programmed collateral cleavage activity allows the CRISPR systems to detect the presence of a specific RNA by triggering programmed cell death or by nonspecific degradation of labeled RNA.

[0297] The SHERLOCK method (Specific High Sensitivity Enzymatic Reporter UnLOCKing) provides an in vitro nucleic acid detection platform with attomolar sensitivity based on nucleic acid amplification and collateral cleavage of a reporter RNA, allowing for real-time detection of the target. To achieve signal detection, the detection can be combined with different isothermal amplification steps. For example, recombinase polymerase amplification (RPA) can be coupled with T7 transcription to convert amplified DNA to RNA for subsequent detection. The combination of amplification by RPA, T7 RNA polymerase transcription of amplified DNA to RNA, and detection of target RNA by collateral RNA cleavage-mediated release of reporter signal is referred as SHERLOCK. Methods of using CRISPR in SHERLOCK are described in detail, e.g., in Gootenberg, et al. “Nucleic acid detection with CRISPR-Cas13a/C2c2,” Science, 2017 Apr. 28; 356(6336):438-442, which is incorporated herein by reference in its entirety.

[0298] The CRISPR-associated proteins can further be used in Northern blot assays, which use electrophoresis to separate RNA samples by size. The CRISPR-associated proteins can be used to specifically bind and detect the target RNA sequence. The CRISPR-associated proteins can also be fused to a fluorescent protein (e.g., GFP) and used to track RNA localization in living cells. More particularly, the CRISPR-associated proteins can be inactivated in that they no longer cleave RNAs as described above. Thus, CRISPR-associated proteins can be used to determine the localization of the RNA or specific splice variants, the level of mRNA transcripts, up- or down-regulation of transcripts and disease-specific diagnosis. The CRISPR-associated proteins can be used for visualization of RNA in (living) cells using, for example, fluorescent microscopy or flow cytometry, such as fluorescence-activated cell sorting (FACS), which allows for high-throughput screening of cells and recovery of living cells following cell sorting. A detailed description regarding how to detect DNA and RNA can be found, e.g., in International Publication No. WO 2017/070605, which is incorporated herein by reference in its entirety.

[0299] In some embodiments, the CRISPR systems described herein can be used in multiplexed error-robust fluorescence in situ hybridization (MERFISH). These methods are described in, e.g., Chen et al., “Spatially resolved, highly multiplexed RNA profiling in single cells,” Science, 2015 Apr. 24; 348(6233):aaa6090, which is incorporated herein by reference herein in its entirety.

[0300] In some embodiments, the CRISPR systems described herein can be used to detect a target RNA in a sample (e.g., a clinical sample, a cell, or a cell lysate). The collateral RNAse activity of the Type VI-D CRISPR-Cas effector proteins described herein is activated when the effector proteins bind to a target nucleic acid. Upon binding to the target RNA of interest, the effector protein cleaves a labeled detector RNA to generate a signal (e.g., an increased signal or a decreased signal) thereby allowing for the qualitative and quantitative detection of the target RNA in the sample. The specific detection and quantification of RNA in the sample allows for a multitude of applications including diagnostics. In some embodiments, the methods include contacting a sample with: i) an RNA guide (e.g., crRNA) and/or a nucleic acid encoding the RNA guide, wherein the RNA guide consists of a direct repeat sequence and a spacer sequence capable of hybridizing to the target RNA; (ii) a Type VI-D CRISPR-Cas effector protein and/or a nucleic acid encoding the effector protein; and (iii) a labeled detector RNA; wherein the effector protein associates with the RNA guide to form a complex; wherein the RNA guide hybridizes to the target RNA; and wherein upon binding of the complex to the target RNA, the effector protein exhibits collateral RNAse activity and cleaves the labeled detector RNA; and b) measuring a detectable signal produced by cleavage of the labeled detector RNA, wherein said measuring provides for detection of the single-stranded target RNA in the sample. In some embodiments, the methods further comprise comparing the detectable signal with a reference signal and determining the amount of target RNA in the sample. In some embodiments, the measuring is performed using gold nanoparticle detection, fluorescence polarization, colloid phase transition/dispersion, electrochemical detection, and semiconductor based-sensing. In some embodiments, the labeled detector RNA includes a fluorescence-emitting dye pair, a fluorescence resonance energy transfer (FRET) pair, or a quencher/fluor pair. In some embodiments, upon cleavage of the labeled detector RNA by the effector protein, an amount of detectable signal produced by the labeled detector RNA is decreased or increased. In some embodiments, the labeled detector RNA produces a first detectable signal prior to cleavage by the effector protein and a second detectable signal after cleavage by the effector protein. In some embodiments, a detectable signal is produced when the labeled detector RNA is cleaved by the effector protein. In some embodiments, the labeled detector RNA comprises a modified nucleobase, a modified sugar moiety, a modified nucleic acid linkage, or a combination thereof. In some embodiments, the methods include the multi-channel detection of multiple independent target RNAs in a sample (e.g., two, three, four, five, six, seven, eight, nine, ten, fifteen, twenty, thirty, forty, or more target RNAs) by using multiple Type VI-D CRISPR-Cas systems, each including a distinct orthologous effector protein and corresponding RNA guides, allowing for the differentiation of multiple target RNAs in the sample. In some embodiments, the methods include the multi-channel detection of multiple independent target RNAs in a sample, with the use of multiple instances of Type VI-D CRISPR-Cas systems, each containing an orthologous effector protein with differentiable collateral RNAse substrates. Methods of detecting an RNA in a sample using CRISPR-associated proteins are described, for example, in U.S. Patent Publication No. 2017/0362644, the entire contents of which are incorporated herein by reference.

[0301] Tracking and Labeling of Nucleic Acids

[0302] Cellular processes depend on a network of molecular interactions among proteins, RNAs, and DNAs. Accurate detection of protein-DNA and protein-RNA interactions is key to understanding such processes. In vitro proximity labeling techniques employ an affinity tag combined with, a reporter group, e.g., a photoactivatable group, to label polypeptides and RNAs in the vicinity of a protein or RNA of interest in vitro. After UV irradiation, the photoactivatable groups react with proteins and other molecules that are in close proximity to the tagged molecules, thereby labelling them. Labelled interacting molecules can subsequently be recovered and identified. The CRISPR-associated proteins can for instance be used to target probes to selected RNA sequences. These applications can also be applied in animal models for in vivo imaging of diseases or difficult-to culture cell types. The methods of tracking and labeling of nucleic acids are described, e.g., in U.S. Pat. No. 8,795,965, WO 2016205764, and WO 2017070605; each of which is incorporated herein by reference herein in its entirety.

[0303] RNA Isolation, Purification, Enrichment, and/or Depletion

[0304] The CRISPR systems (e.g., CRISPR-associated proteins) described herein can be used to isolate and/or purify the RNA. The CRISPR-associated proteins can be fused to an affinity tag that can be used to isolate and/or purify the RNA-CRISPR-associated protein complex. These applications are useful, e.g., for the analysis of gene expression profiles in cells.

[0305] In some embodiments, the CRISPR-associated proteins can be used to target a specific noncoding RNA (ncRNA) thereby blocking its activity. In some embodiments, the CRISPR-associated proteins can be used to specifically enrich a particular RNA (including but not limited to increasing stability, etc.), or alternatively, to specifically deplete a particular RNA (e.g., particular splice variants, isoforms, etc.).

[0306] These methods are described, e.g., in U.S. Pat. No. 8,795,965, WO 2016205764, and WO 2017070605; each of which is incorporated herein by reference herein in its entirety.

[0307] High-Throughput Screening

[0308] The CRISPR systems described herein can be used for preparing next generation sequencing (NGS) libraries. For example, to create a cost-effective NGS library, the CRISPR systems can be used to disrupt the coding sequence of a target gene, and the CRISPR-associated protein transfected clones can be screened simultaneously by next-generation sequencing (e.g., on the Ion Torrent PGM system). A detailed description regarding how to prepare NGS libraries can be found, e.g., in Bell et al., “A high-throughput screening strategy for detecting CRISPR-Cas9 induced mutations using next-generation sequencing,” BMC Genomics, 15.1 (2014): 1002, which is incorporated herein by reference in its entirety.

### Engineered Microorganisms

[0309] Microorganisms (e.g., E. coli, yeast, and microalgae) are widely used for synthetic biology. The development of synthetic biology has a wide utility, including various clinical applications. For example, the programmable CRISPR systems can be used to split proteins of toxic domains for targeted cell death, e.g., using cancer-linked RNA as target transcript. Further, pathways involving protein-protein interactions can be influenced in synthetic biological systems with e.g. fusion complexes with the appropriate effectors such as kinases or enzymes.

[0310] In some embodiments, crRNAs that target phage sequences can be introduced into the microorganism. Thus, the disclosure also provides methods of vaccinating a microorganism (e.g., a production strain) against phage infection.

[0311] In some embodiments, the CRISPR systems provided herein can be used to engineer microorganisms, e.g., to improve yield or improve fermentation efficiency. For example, the CRISPR systems described herein can be used to engineer microorganisms, such as yeast, to generate biofuel or biopolymers from fermentable sugars, or to degrade plant-derived lignocellulose derived from agricultural waste as a source of fermentable sugars. More particularly, the methods described herein can be used to modify the expression of endogenous genes required for biofuel production and/or to modify endogenous genes, which may interfere with the biofuel synthesis. These methods of engineering microorganisms are described e.g., in Verwaal et al., “CRISPR/Cpf1 enables fast and simple genome editing of Saccharomyces cerevisiae,” Yeast, 2017 Sep. 8. doi: 10.1002/yea.3278; and Hlavova et al., “Improving microalgae for biotechnology—from genetics to synthetic biology,” Biotechnol. Adv., 2015 Nov. 1; 33:1194-203, both of which are incorporated herein by reference in the entirety.

[0312] In some embodiments, the CRISPR systems provided herein can be used to induce death or dormancy of a cell (e.g., a microorganism such as an engineered microorganism). These methods can be used to induce dormancy or death of a multitude of cell types including prokaryotic and eukaryotic cells, including, but not limited to mammalian cells (e.g., cancer cells, or tissue culture cells), protozoans, fungal cells, cells infected with a virus, cells infected with an intracellular bacteria, cells infected with an intracellular protozoan, cells infected with a prion, bacteria (e.g., pathogenic and non-pathogenic bacteria), protozoans, and unicellular and multicellular parasites. For instance, in the field of synthetic biology it is highly desireable to have mechanisms of controlling engineered microorganisms (e.g., bacteria) in order to prevent their propagation or dissemination. The systems described herein can be used as “kill-switches” to regulate and/or prevent the propagation or dissemination of an engineered microorganism. Further, there is a need in the art for alternatives to current antibiotic treatments. The systems described herein can also be used in applications where it is desirable to kill or control a specific microbial population (e.g., a bacterial population). For example, the systems described herein may include an RNA guide (e.g., a crRNA) that targets a nucleic acid (e.g., an RNA) that is genus-, species-, or strain-specific, and can be delivered to the cell. Upon complexing and binding to the target nucleic acid, the collateral RNAse activity of the Type VI-D CRISPR-Cas effector proteins is activated leading to the cleavage of non-target RNA within the microorganisms, ultimately resulting in dormancy or death.

[0313] In some embodiments, the methods comprise contacting the cell with a system described herein including a Type VI-D CRISPR-Cas effector proteins or a nucleic acid encoding the effector protein, and a RNA guide (e.g., a crRNA) or a nucleic acid encoding the RNA guide, wherein the spacer sequence is complementary to at least 15 nucleotides (e.g., 16, 17, 18, 19, 20, 21, 22, 23, 24, 25, 26, 27, 28, 29, 30, 35, 40, 45, 50 or more nucleotides) of a target nucleic acid (e.g., a genus-, strain-, or species-specific RNA guide). Without wishing to be bound by any particular theory, the cleavage of non-target RNA by the Type VI-D CRISPR-Cas effector proteins may induce programmed cell death, cell toxicity, apoptosis, necrosis, necroptosis, cell death, cell cycle arrest, cell anergy, a reduction of cell growth, or a reduction in cell proliferation. For example, in bacteria, the cleavage of non-target RNA by the Type VI-D CRISPR-Cas effector proteins may be bacteriostatic or bacteriocidal.

[0314] Applications in Plants

[0315] The CRISPR systems described herein have a wide variety of utility in plants. In some embodiments, the CRISPR systems can be used to engineer genomes of plants (e.g., improving production, making products with desired post-translational modifications, or introducing genes for producing industrial products). In some embodiments, the CRISPR systems can be used to introduce a desired trait to a plant (e.g., with or without heritable modifications to the genome), or regulate expression of endogenous genes in plant cells or whole plants.

[0316] In some embodiments, the CRISPR systems can be used to identify, edit, and/or silence genes encoding specific proteins, e.g., allergenic proteins (e.g., allergenic proteins in peanuts, soybeans, lentils, peas, green beans, and mung beans). A detailed description regarding how to identify, edit, and/or silence genes encoding proteins is described, e.g., in Nicolaou et al., “Molecular diagnosis of peanut and legume allergy,” Curr. Opin. Allergy Clin. Immunol., 2011 June; 11(3):222-8, and WO 2016205764 A1; both of which are incorporated herein by reference in the entirety.

[0317] Gene Drives

[0318] Gene drive is the phenomenon in which the inheritance of a particular gene or set of genes is favorably biased. The CRISPR systems described herein can be used to build gene drives. For example, the CRISPR systems can be designed to target and disrupt a particular allele of a gene, causing the cell to copy the second allele to fix the sequence. Because of the copying, the first allele will be converted to the second allele, increasing the chance of the second allele being transmitted to the offspring. A detailed method regarding how to use the CRISPR systems described herein to build gene drives is described, e.g., in Hammond et al., “A CRISPR-Cas9 gene drive system targeting female reproduction in the malaria mosquito vector Anopheles gambiae,” Nat. Biotechnol., 2016 January; 34(1):78-83, which is incorporated herein by reference in its entirety.

[0319] Pooled-Screening

[0320] As described herein, pooled CRISPR screening is a powerful tool for identifying genes involved in biological mechanisms such as cell proliferation, drug resistance, and viral infection. Cells are transduced in bulk with a library of RNA guide-encoding vectors described herein, and the distribution of RNA guides is measured before and after applying a selective challenge. Pooled CRISPR screens work well for mechanisms that affect cell survival and proliferation, and they can be extended to measure the activity of individual genes (e.g., by using engineered reporter cell lines). Arrayed CRISPR screens, in which only one gene is targeted at a time, make it possible to use RNA-seq as the readout. In some embodiments, the CRISPR systems as described herein can be used in single-cell CRISPR screens. A detailed description regarding pooled CRISPR screenings can be found, e.g., in Datlinger et al., “Pooled CRISPR screening with single-cell transcriptome read-out,” Nat. Methods., 2017 March; 14(3):297-301, which is incorporated herein by reference in its entirety.

[0321] Saturation Mutagenesis (Bashing)

[0322] The CRISPR systems described herein can be used for in situ saturating mutagenesis. In some embodiments, a pooled RNA guide library can be used to perform in situ saturating mutagenesis for particular genes or regulatory elements. Such methods can reveal critical minimal features and discrete vulnerabilities of these genes or regulatory elements (e.g., enhancers). These methods are described, e.g., in Canver et al., “BCL11A enhancer dissection by Cas9-mediated in situ saturating mutagenesis,” Nature, 2015 Nov. 12; 527(7577):192-7, which is incorporated herein by reference in its entirety.

[0323] RNA-Related Applications

[0324] The CRISPR systems described herein can have various RNA-related applications, e.g., modulating gene expression, degrading a RNA molecule, inhibiting RNA expression, screening RNA or RNA products, determining functions of lincRNA or non-coding RNA, inducing cell dormancy, inducing cell cycle arrest, reducing cell growth and/or cell proliferation, inducing cell anergy, inducing cell apoptosis, inducing cell necrosis, inducing cell death, and/or inducing programmed cell death. A detailed description of these applications can be found, e.g., in WO 2016/205764 A1, which is incorporated herein by reference in its entirety. In different embodiments, the methods described herein can be performed in vitro, in vivo, or ex vivo.

[0325] For example, the CRISPR systems described herein can be administered to a subject having a disease or disorder to target and induce cell death in a cell in a diseased state (e.g., cancer cells or cells infected with an infectious agent). For instance, in some embodiments, the CRISPR systems described herein can be used to target and induce cell death in a cancer cell, wherein the cancer cell is from a subject having a Wilms' tumor, Ewing sarcoma, a neuroendocrine tumor, a glioblastoma, a neuroblastoma, a melanoma, skin cancer, breast cancer, colon cancer, rectal cancer, prostate cancer, liver cancer, renal cancer, pancreatic cancer, lung cancer, biliary cancer, cervical cancer, endometrial cancer, esophageal cancer, gastric cancer, head and neck cancer, medullary thyroid carcinoma, ovarian cancer, glioma, lymphoma, leukemia, myeloma, acute lymphoblastic leukemia, acute myelogenous leukemia, chronic lymphocytic leukemia, chronic myelogenous leukemia, Hodgkin's lymphoma, non-Hodgkin's lymphoma, or urinary bladder cancer.

[0326] Modulating Gene Expression

[0327] The CRISPR systems described herein can be used to modulate gene expression. The CRISPR systems can be used, together with suitable RNA guides, to target gene expression, via control of RNA processing. The control of RNA processing can include, e.g., RNA processing reactions such as RNA splicing (e.g., alternative splicing), viral replication, and tRNA biosynthesis. The RNA targeting proteins in combination with suitable RNA guides can also be used to control RNA activation (RNAa). RNA activation is a small RNA-guided and Argonaute (Ago)-dependent gene regulation phenomenon in which promoter-targeted short double-stranded RNAs (dsRNAs) induce target gene expression at the transcriptional/epigenetic level. RNAa leads to the promotion of gene expression, so control of gene expression may be achieved that way through disruption or reduction of RNAa. In some embodiments, the methods include the use of the RNA targeting CRISPR as substitutes for e.g., interfering ribonucleic acids (such as siRNAs, shRNAs, or dsRNAs). The methods of modulating gene expression are described, e.g., in WO 2016205764, which is incorporated herein by reference in its entirety.

[0328] Controlling RNA Interference

[0329] Control over interfering RNAs or microRNAs (miRNA) can help reduce off-target effects by reducing the longevity of the interfering RNAs or miRNAs in vivo or in vitro. In some embodiments, the target RNAs can include interfering RNAs, i.e., RNAs involved in the RNA interference pathway, such as small hairpin RNAs (shRNAs), small interfering (siRNAs), etc. In some embodiments, the target RNAs include, e.g., miRNAs or double stranded RNAs (dsRNA).

[0330] In some embodiments, if the RNA targeting protein and suitable RNA guides are selectively expressed (for example spatially or temporally under the control of a regulated promoter, for example a tissue- or cell cycle-specific promoter and/or enhancer), this can be used to protect the cells or systems (in vivo or in vitro) from RNA interference (RNAi) in those cells. This may be useful in neighboring tissues or cells where RNAi is not required or for the purposes of comparison of the cells or tissues where the CRISPR-associated proteins and suitable crRNAs are and are not expressed (i.e., where the RNAi is not controlled and where it is, respectively). The RNA targeting proteins can be used to control or bind to molecules comprising or consisting of RNAs, such as ribozymes, ribosomes, or riboswitches. In some embodiments, the RNA guides can recruit the RNA targeting proteins to these molecules so that the RNA targeting proteins are able to bind to them. These methods are described, e.g., in WO 2016205764 and WO 2017070605, both of which are incorporated herein by reference in the entirety.

[0331] Modifying Riboswitches and Controlling Metabolic Regulations

[0332] Riboswitches are regulatory segments of messenger RNAs that bind small molecules and in turn regulate gene expression. This mechanism allows the cell to sense the intracellular concentration of these small molecules. A specific riboswitch typically regulates its adjacent gene by altering the transcription, the translation or the splicing of this gene. Thus, in some embodiments, the riboswitch activity can be controlled by the use of the RNA targeting proteins in combination with suitable RNA guides to target the riboswitches. This may be achieved through cleavage of, or binding to, the riboswitch. Methods of using CRISPR systems to control riboswitches are described, e.g., in WO 2016205764 and WO 2017070605, both of which are incorporated herein by reference in their entireties.

[0333] RNA Modification

[0334] In some embodiments, the CRISPR-associated proteins described herein can be fused to a base-editing domain, such as ADAR1, ADAR2, APOBEC, or activation-induced cytidine deaminase (AID), and can be used to modify an RNA sequence (e.g., an mRNA). In some embodiments, the CRISPR-associated protein includes one or more mutations (e.g., in a catalytic domain), which renders the CRISPR-associated protein incapable of cleaving RNA.

[0335] In some embodiments, the CRISPR-associated proteins can be used with an RNA-binding fusion polypeptide comprising a base-editing domain (e.g., ADAR1, ADAR2, APOBEC, or AID) fused to an RNA-binding domain, such as MS2 (also known as MS2 coat protein), Qbeta (also known as Qbeta coat protein), or PP7 (also known as PP7 coat protein). The amino acid sequences of the RNA-binding domains MS2, Qbeta, and PP7 are provided below:

MS2 (MS2 coat protein)
(SEQ ID NO: 171)
MASNFTQFVLVDNGGTGDVTVAPSNFANGVAEWISSNSRSQAYKVTCSVR
QSSAQKRKYTIKVEVPKVATQTVGGVELPVAAWRSYLNMELTIPIFATNS
DCELIVKAMQGLLKDGNPIPSAIAANSGIY
Qbeta (Qbeta coat protein)
(SEQ ID NO: 172)
MAKLETVTLGNIGKDGKQTLVLNPRGVNPTNGVASLSQAGAVPALEKRVT
VSVSQPSRNRKNYKVQVKIQNPTACTANGSCDPSVTRQAYADVTFSFTQY
STDEERAFVRTELAALLASPLLIDAIDQLNPAY
PP7 (PP7 coat protein)
(SEQ ID NO: 155)
MSKTIVLSVGEATRTLTEIQSTADRQIFEEKVGPLVGRLRLTASLRQNGA
KTAYRVNLKLDQADVVDCSTSVCGELPKVRYTQVWSHDVTIVANSTEASR
KSLYDLTKSLVVQATSEDLVVNLVPLGR

In some embodiments, the RNA binding domain can bind to a specific sequence (e.g., an aptamer sequence) or secondary structure motifs on a crRNA of the system described herein (e.g., when the crRNA is in an effector-crRNA complex), thereby recruiting the RNA binding fusion polypeptide (which has a base-editing domain) to the effector complex. For example, in some embodiments, the CRISPR system includes a CRISPR associated protein, a crRNA having an aptamer sequence (e.g., an MS2 binding loop, a QBeta binding loop, or a PP7 binding loop), and a RNA-binding fusion polypeptide having a base-editing domain fused to an RNA-binding domain that specifically binds to the aptamer sequence. In this system, the CRISPR-associated protein forms a complex with the crRNA having the aptamer sequence. Further the RNA-binding fusion polypeptide binds to the crRNA (via the aptamer sequence) thereby forming a tripartite complex that can modify a target RNA.

[0336] Methods of using CRISPR systems for base editing are described, e.g., in International Publication No. WO 2017/219027, which is incorporated herein by reference in its entirety, and in particular with respect to its discussion of RNA modification.

[0337] RNA Splicing

[0338] In some embodiments, an inactivated CRISPR-associated protein described herein (e.g., a CRISPR associated protein having one or more mutations in a catalytic domain) can be used to target and bind to specific splicing sites on RNA transcripts. Binding of the inactivated CRISPR-associated protein to the RNA may sterically inhibit interaction of the spliceosome with the transcript, enabling alteration in the frequency of generation of specific transcript isoforms. Methods of using CRISPR systems to alter splicing are described, e.g., in International Publication No. WO 2017/219027, which is incorporated herein by reference in its entirety, and in particular with respect to its discussion of RNA splicing.

[0339] Therapeutic Applications

[0340] The CRISPR systems described herein can have various therapeutic applications. In some embodiments, the new CRISPR systems can be used to treat various diseases and disorders, e.g., genetic disorders (e.g., monogenetic diseases), diseases that can be treated by nuclease activity (e.g., Pcsk9 targeting, Duchenne Muscular Dystrophy (DMD), BCL11a targeting), and various cancers, etc.

[0341] In some embodiments, the CRISPR systems described herein can be used to edit a target nucleic acid to modify the target nucleic acid (e.g., by inserting, deleting, or mutating one or more nucleic acid residues). For example, in some embodiments the CRISPR systems described herein comprise an exogenous donor template nucleic acid (e.g., a DNA molecule or a RNA molecule), which comprises a desirable nucleic acid sequence. Upon resolution of a cleavage event induced with the CRISPR system described herein, the molecular machinery of the cell will utilize the exogenous donor template nucleic acid in repairing and/or resolving the cleavage event. Alternatively, the molecular machinery of the cell can utilize an endogenous template in repairing and/or resolving the cleavage event. In some embodiments, the CRISPR systems described herein may be used to alter a target nucleic acid resulting in an insertion, a deletion, and/or a point mutation). In some embodiments, the insertion is a scarless insertion (i.e., the insertion of an intended nucleic acid sequence into a target nucleic acid resulting in no additional unintended nucleic acid sequence upon resolution of the cleavage event). Donor template nucleic acids may be double stranded or single stranded nucleic acid molecules (e.g., DNA or RNA). Methods of designing exogenous donor template nucleic acids are described, for example, in International Publication No. WO 2016/094874 A1, the entire contents of which are expressly incorporated herein by reference.

[0342] In one aspect, the CRISPR systems described herein can be used for treating a disease caused by overexpression of RNAs, toxic RNAs, and/or mutated RNAs (e.g., splicing defects or truncations). For example, expression of toxic RNAs may be associated with the formation of nuclear inclusions and late-onset degenerative changes in brain, heart, or skeletal muscle. In some embodiments, the disorder is myotonic dystrophy. In myotonic dystrophy, the main pathogenic effect of the toxic RNAs is to sequester binding proteins and compromise the regulation of alternative splicing (see, e.g., Osborne et al., “RNA-dominant diseases,” Hum. Mol. Genet., 2009 Apr. 15; 18(8):1471-81). Myotonic dystrophy (dystrophia myotonica (DM)) is of particular interest to geneticists because it produces an extremely wide range of clinical features. The classical form of DM, which is now called DM type 1 (DM1), is caused by an expansion of CTG repeats in the 3′-untranslated region (UTR) of DMPK, a gene encoding a cytosolic protein kinase. The CRISPR systems as described herein can target overexpressed RNA or toxic RNA, e.g., the DMPK gene or any of the mis-regulated alternative splicing in DM1 skeletal muscle, heart, or brain.

[0343] The CRISPR systems described herein can also target trans-acting mutations affecting RNA-dependent functions that cause various diseases such as, e.g., Prader Willi syndrome, Spinal muscular atrophy (SMA), and Dyskeratosis congenita. A list of diseases that can be treated using the CRISPR systems described herein is summarized in Cooper et al., “RNA and disease,” Cell, 136.4 (2009): 777-793, and WO 2016/205764 A1, both of which are incorporated herein by reference in the entirety. Those of skill in this field will understand how to use the new CRISPR systems to treat these diseases.

[0344] The CRISPR systems described herein can also be used in the treatment of various tauopathies, including, e.g., primary and secondary tauopathies, such as primary age-related tauopathy (PART)/Neurofibrillary tangle (NFT)-predominant senile dementia (with NFTs similar to those seen in Alzheimer Disease (AD), but without plaques), dementia pugilistica (chronic traumatic encephalopathy), and progressive supranuclear palsy. A useful list of tauopathies and methods of treating these diseases are described, e.g., in WO 2016205764, which is incorporated herein by reference in its entirety.

[0345] The CRISPR systems described herein can also be used to target mutations disrupting the cis-acting splicing codes that can cause splicing defects and diseases. These diseases include, e.g., motor neuron degenerative disease that results from deletion of the SMN1 gene (e.g., spinal muscular atrophy), Duchenne Muscular Dystrophy (DMD), frontotemporal dementia, and Parkinsonism linked to chromosome 17 (FTDP-17), and cystic fibrosis.

[0346] The CRISPR systems described herein can further be used for antiviral activity, in particular against RNA viruses. The CRISPR-associated proteins can target the viral RNAs using suitable RNA guides selected to target viral RNA sequences.

[0347] The CRISPR systems described herein can also be used to treat a cancer in a subject (e.g., a human subject). For example, the CRISPR-associated proteins described herein can be programmed with crRNA targeting a RNA molecule that is aberrant (e.g., comprises a point mutation or are alternatively-spliced) and found in cancer cells to induce cell death in the cancer cells (e.g., via apoptosis).

[0348] Further, the CRISPR systems described herein can also be used to treat an infectious disease in a subject. For example, the CRISPR-associated proteins described herein can be programmed with crRNA targeting a RNA molecule expressed by an infectious agent (e.g., a bacteria, a virus, a parasite or a protozoan) in order to target and induce cell death in the infectious agent cell. The CRISPR systems may also be used to treat diseases where an intracellular infectious agent infects the cells of a host subject. By programming the CRISPR-associated protein to target a RNA molecule encoded by an infectious agent gene, cells infected with the infectious agent can be targeted and cell death induced.

[0349] Furthermore, in vitro RNA sensing assays can be used to detect specific RNA substrates. The CRISPR-associated proteins can be used for RNA-based sensing in living cells. Examples of applications are diagnostics by sensing of, for examples, disease-specific RNAs.

[0350] A detailed description of therapeutic applications of the CRISPR systems described herein can be found, e.g., in U.S. Pat. No. 8,795,965, EP 3009511, WO 2016205764, and WO 2017070605; each of which is incorporated herein by reference in its entirety.

### Delivery

[0351] Through this disclosure and the knowledge in the art, the CRISPR systems described herein, or components thereof, nucleic acid molecules thereof, and/or nucleic acid molecules encoding or providing components thereof, can be delivered by various delivery systems such as vectors, e.g., plasmids and viral delivery vectors (e.g., adeno-associated virus AAV vectors). The CRISPR-associated proteins and/or any of the RNAs (e.g., RNA guides) and/or accessory proteins can be delivered using suitable vectors, e.g., plasmids or viral vectors, such as adeno-associated viruses (AAV), lentiviruses, adenoviruses, and other viral vectors, or combinations thereof. The proteins and one or more crRNAs can be packaged into one or more vectors, e.g., plasmids or viral vectors. For bacterial applications, the nucleic acids encoding any of the components of the CRISPR systems described herein can be delivered to the bacteria using a phage. Exemplary phages, include, but are not limited to, T4 phage, Mu, λ phage, T5 phage, T7 phage, T3 phage, Φ29, M13, MS2, Qβ, and ΦX174.

[0352] In some embodiments, the vectors, e.g., plasmids or viral vectors, are delivered to the tissue of interest by, e.g., intramuscular injection, intravenous administration, transdermal administration, intranasal administration, oral administration, or mucosal administration. Such delivery may be either via a single dose, or multiple doses. One skilled in the art understands that the actual dosage to be delivered herein may vary greatly depending upon a variety of factors, such as the vector choices, the target cells, organisms, tissues, the general conditions of the subject to be treated, the degrees of transformation/modification sought, the administration routes, the administration modes, the types of transformation/modification sought, etc.

[0353] In certain embodiments, the delivery is via adenoviruses, which can be at a single dose containing at least 1×10⁵ particles (also referred to as particle units, pu) of adenoviruses. In some embodiments, the dose preferably is at least about 1×10⁶ particles, at least about 1×10⁷ particles, at least about 1×10⁸ particles, and at least about 1×10⁹ particles of the adenoviruses. Exemplary delivery methods and the doses are described, e.g., in WO 2016205764 A1 and U.S. Pat. No. 8,454,972 B2, both of which are incorporated herein by reference in the entirety.

[0354] In some embodiments, the delivery is via a recombinant adeno-associated virus (rAAV) vector. For example, in some embodiments, a modified AAV vector may be used for delivery. Modified AAV vectors can be based on one or more of several capside types, including AAV1, AV2, AAV5, AAV6, AAV8, AAV 8.2. AAV9, AAV rhlO, modified AAV vectors (e.g., modified AAV2, modified AAV3, modified AAV6) and pseudotyped AAV (e.g., AAV2/8, AAV2/5 and AAV2/6). Exemplary AAV vectors and techniques that may be used to produce rAAV particles are known in the art (see, e.g., Aponte-Ubillus et al. (2018) Appl. Microbiol. Biotechnol. 102(3): 1045-54; Zhong et al. (2012) J. Genet. Syndr. Gene Ther. S1: 008; West et al. (1987) Virology 160: 38-47 (1987); Tratschin et al. (1985) Mol. Cell. Biol. 5: 3251-60); U.S. Pat. Nos. 4,797,368 and 5,173,414; and International Publication Nos. WO 2015/054653 and WO 93/24641, each of which are incorporated by reference).

[0355] In some embodiments, the delivery is via plasmids. The dosage can be a sufficient number of plasmids to elicit a response. In some cases, suitable quantities of plasmid DNA in plasmid compositions can be from about 0.1 to about 2 mg. Plasmids will generally include (i) a promoter; (ii) a sequence encoding a nucleic acid-targeting CRISPR-associated proteins and/or an accessory protein, each operably linked to a promoter (e.g., the same promoter or a different promoter); (iii) a selectable marker; (iv) an origin of replication; and (v) a transcription terminator downstream of and operably linked to (ii). The plasmids can also encode the RNA components of a CRISPR complex, but one or more of these may instead be encoded on different vectors. The frequency of administration is within the ambit of the medical or veterinary practitioner (e.g., physician, veterinarian), or a person skilled in the art.

[0356] In another embodiment, the delivery is via liposomes or lipofection formulations and the like, and can be prepared by methods known to those skilled in the art. Such methods are described, for example, in WO 2016205764 and U.S. Pat. Nos. 5,593,972; 5,589,466; and 5,580,859; each of which is incorporated herein by reference in its entirety.

[0357] In some embodiments, the delivery is via nanoparticles or exosomes. For example, exosomes have been shown to be particularly useful in delivery RNA.

[0358] Further means of introducing one or more components of the new CRISPR systems to the cell is by using cell penetrating peptides (CPP). In some embodiments, a cell penetrating peptide is linked to the CRISPR-associated proteins. In some embodiments, the CRISPR-associated proteins and/or RNA guides are coupled to one or more CPPs to effectively transport them inside cells (e.g., plant protoplasts). In some embodiments, the CRISPR-associated proteins and/or RNA guides are encoded by one or more circular or non-circular DNA molecules that are coupled to one or more CPPs for cell delivery.

[0359] CPPs are short peptides of fewer than 35 amino acids derived either from proteins or from chimeric sequences capable of transporting biomolecules across cell membrane in a receptor independent manner. CPPs can be cationic peptides, peptides having hydrophobic sequences, amphipathic peptides, peptides having proline-rich and anti-microbial sequences, and chimeric or bipartite peptides. Examples of CPPs include, e.g., Tat (which is a nuclear transcriptional activator protein required for viral replication by HIV type 1), penetratin, Kaposi fibroblast growth factor (FGF) signal peptide sequence, integrin 3 signal peptide sequence, polyarginine peptide Args sequence, Guanine rich-molecular transporters, and sweet arrow peptide. CPPs and methods of using them are described, e.g., in Hallbrink et al., “Prediction of cell-penetrating peptides,” Methods Mol. Biol., 2015; 1324:39-58; Ramakrishna et al., “Gene disruption by cell-penetrating peptide-mediated delivery of Cas9 protein and guide RNA,” Genome Res., 2014 June; 24(6):1020-7; and WO 2016205764 A1; each of which is incorporated herein by reference in its entirety.

[0360] Various delivery methods for the CRISPR systems described herein are also described, e.g., in U.S. Pat. No. 8,795,965, EP 3009511, WO 2016205764, and WO 2017070605; each of which is incorporated herein by reference in its entirety.

### Methods of Identifying CRISPR-Associated Protein Families

[0361] In one aspect, the disclosure relates to the use of computational methods and algorithms to search for and identify novel protein families that exhibit a strong co-occurrence pattern with certain other features within naturally occurring genone sequences.

[0362] In certain embodiments, these computational methods are directed to identifying protein families that co-occur in close proximity to CRISPR arrays. However, the methods disclosed herein are useful in identifying proteins that naturally occur within close proximity to other features, both non-coding and protein-coding (for example, CRISPR Cas1 proteins). It should be understood that the methods and calculations described herein may be performed on one or more computing devices.

[0363] In some embodiments, a set of genomic sequences are obtained from genomic or metagenomic databases. The databases comprise short reads, contig level data, assembled scaffolds, or complete organisms. Likewise, the database may comprise genomic sequence data from prokaryotic organisms, or eukarVotic organisms, or may include data from mretagenomic environmtental samples. Exemplary database repositories include NCBI RefSeq, NCBI GenBank, NCBI Whole Genome Shotgun (WGS), and JGI Integrated Microbial Genomes (IMG).

[0364] In some embodiments, a minimum size requirement is imposed to select genome sequence data of a specified minimum length. In certain exemplary embodiments, the minimum contig length may be 100 nucleotides, 500 nt, 1 kb, 2 kb, 3 kb, 4 kb, 5 kb, 10 kb, 20 kb, 40 kb, or 50 kb.

[0365] In some embodiments, known or predicted proteins are extracted from the complete or a selected set of genome sequence data. In some embodiments, known or predicted proteins are taken from extracting coding sequence (CDS) annotations provided by the source database. In some embodiments, predicted proteins are determined by applying a computational method to identify proteins from nucleotide sequences. In some embodiments, the GeneMark Suite is used to predict proteins from genome sequences. In some embodiments, Prodigal is used to predict proteins from genome sequences. In some embodiments, multiple protein prediction algorithms may be used over the same set of sequence data with the resulting set of proteins de-duplicated.

[0366] In some embodiments, CRISPR arrays are identified from the genome sequence data. In some embodiments, PILER-CR is used to identify CRISPR arrays. In some embodiments, CRISPR Recognition Tool (CRT) is used to identify CRISPR arrays. In some embodiments, multiple CRISPR array identification tools may be used over the same set of sequence data with the resulting set of CRISPR arrays de-duplicated.

[0367] In some embodiments, proteins in close proximity to CRISPR arrays are identified. In some embodiments, proximity is defined as a nucleotide distance, and may be within 20 kb, 15 kb, or 5 kb. In some embodiments, proximity is defined as the number of open reading frames (ORFs) between a protein and a CRISPR array, and certain exemplary distances may be 10, 5, 4, 3, 2, 1, or 0 ORFs. The proteins identified as being within close proximity to a CRISPR array are then grouped into clusters of homologous proteins. In some embodiments, blastclust is used to form protein clusters. In certain other embodiments, mmseqs2 is used to form protein clusters.

[0368] To establish a pattern of strong co-occurrence between the members of a protein cluster with CRISPR arrays, a BLAST search of each member of the protein family may be performed over the complete set of known and predicted proteins previously compiled. In some embodiments, UBLAST or mmseqs2 may be used to search for similar proteins. In some embodiments, a search may be performed only for a representative subset of proteins in the family.

[0369] In some embodiments, the clusters of proteins within close proximity to CRISPR arrays are ranked or filtered by a metric to determine co-occurrence. One exemplary metric is the ratio of the size of the protein cluster against the number of BLAST matches up to a certain E value threshold. In some embodiments, a constant E value threshold may be used. In other embodiments, the E value threshold may be determined by the most distant members of the protein cluster. In some embodiments, the global set of proteins is clustered and the co-occurrence metric is the ratio of the size of the CRISPR associated cluster against the size(s) of the containing global cluster(s).

[0370] In some embodiments, a manual review process is used to evaluate the potential functionality and the minimal set of components of an engineered system based on the naturally occurring locus structure of the proteins in the cluster. In some embodiments, a graphical representation of the protein cluster may assist in the manual review, and may contain information including pairwise sequence similarity, phylogenetic tree, source organisms/environments, and a graphical depiction of locus structures. In some embodiments, the graphical depiction of locus structures may filter for nearby protein families that have a high representation. In some embodiments, representation may be calculated by the ratio of the number of related nearby proteins against the size(s) of the containing global cluster(s). In certain exemplary embodiments, the graphical representation of the protein cluster may contain a depiction of the CRISPR array structures of the naturally occurring loci. In some embodiments, the graphical representation of the protein cluster may contain a depiction of the number of conserved direct repeats versus the length of the putative CRISPR array, or the number of unique spacer sequences versus the length of the putative CRISPR array. In some embodiments, the graphical representation of the protein cluster may contain a depiction of various metrics of co-occurrence of the putative effector with CRISPR arrays predict new CRISPR-Cas systems and identify their components.

[0371] The broad natural diversity of CRISPR-Cas defense systems contains a wide range of activity mechanisms and functional elements that can be harnessed for programmable biotechnologies. In a natural system, these mechanisms and parameters enable efficient defense against foreign DNA and viruses while providing self vs. non-self-discrimination to avoid self-targeting. In an engineered system, the same mechanisms and parameters also provide a diverse toolbox of molecular technologies and define the boundaries of the targeting space. For instance, systems Cas9 and Cas13a have canonical DNA and RNA endonuclease activity and their targeting spaces are defined by the protospacer adjacent motif (PAM) on targeted DNA and protospacer flanking sites (PFS) on targeted RNA, respectively.

[0372] The methods described herein can be used to discover additional mechanisms and parameters within single subunit Class 2 effector systems that can be more effectively harnessed for programmable biotechnologies.

### Pooled-Screening

[0373] To efficiently validate the activity of the engineered novel CRISPR-Cas systems and simultaneously evaluate in an unbiased manner different activity mechanisms and functional parameters, a new pooled-screening approach was developed in E. coli. First, from the computational identification of the conserved protein and noncoding elements of the novel CRISPR-Cas system, these separate components were assembled into an engineered locus, which in one embodiment is on a singe artificial expression vector based on the pET-28+a backbone; in another embodiment, multiple compatible expression plasmids were used to recapitulate the engineered locus. To construct the vector, in one embodiment, DNA synthesis was used to assemble the components together; in another embodiment, molecular cloning was used for assembly. In another embodiment, the proteins and noncoding elements are transcribed on a single mRNA transcript, and different ribosomal binding sites are used to translate individual proteins.

[0374] Second, a library of unprocessed crRNAs consisting of the direct repeat::spacer::direct repeat sequence was cloned into the engineered locus. In one embodiment, the spacers were targeting a second plasmid, pACYC184, and the spacers were of the length found in the natural CRISPR array. This crRNA library was cloned into the vector backbone containing the proteins and noncoding elements (e.g. pET-28a+), and then subsequently transformed the library into E. coli along with the second target plasmid (e.g., pACYC184). It is important to have the plasmid(s) containing the engineered loci be on compatible origin(s) of replication with respect to the target plasmid to enable bacterial co-transformation. Consequently, each resulting E. coli cell contains no more than one targeting spacer.

[0375] Third, the E. coli were grown under antibiotic selection. In one embodiment, triple antibiotic selection is used: kanamycin for ensuring successful transformation of the pET-28a+ vector containing the engineered CRISPR-Cas effector system, and chloramphenicol and tetracycline for ensuring successful co-transformation of the pACYC184 target vector. Since pACYC184 normally confers resistance to chloramphenicol and tetracycline, under antibiotic selection, positive activity of the novel CRISPR-Cas system targeting the plasmid will eliminate cells that actively express the proteins, noncoding elements, and specific active elements of the crRNA library. Using deep sequencing (e.g., next-generation sequencing), examining the population of surviving cells at a later time point compared to an earlier time point results in a depleted signal specifically for the active elements compared to the inactive crRNAs.

[0376] Since the pACYC184 plasmid contains a diverse set of features and sequences that may affect the activity of a CRISPR-Cas system, mapping the active crRNAs from the pooled screen onto pACYC184 provides patterns of activity that can be suggestive of different activity mechanisms and functional parameters in a broad, hypothesis-agnostic manner. In this way, the features required for reconstituting the novel CRISPR-Cas system in a heterologous prokaryotic species can be more comprehensively tested and studied.

[0377] The key advantages of the in vivo pooled-screen described herein include:

[0378] (1) Versatility—engineered locus design allows multiple proteins and/or noncoding elements to be expressed; the library cloning strategy enables both transcriptional directions of the computationally predicted crRNA to be expressed;

[0379] (2) Comprehensive tests of activity mechanisms & functional parameters—Evaluates diverse interference mechanisms, including DNA or RNA cleavage; examines co-occurrence of features such as transcription, plasmid DNA replication; and flanking sequences for crRNA library can be used to reliably determine PAMs with complexity equivalence of 4N's;

[0380] (3) Sensitivity—pACYC184 is a low copy plasmid, enabling high sensitivity for CRISPR-Cas activity since even modest interference rates can eliminate the antibiotic resistance encoded by the plasmid; and

[0381] (4) Efficiency—Optimized molecular biology steps to enable greater speed and throughput RNA-sequencing and protein expression samples can be directly harvested from the surviving cells in the screen.

[0382] The novel CRISPR-Cas families described herein were evaluated using this in vivo pooled-screen to evaluate their operational elements, mechanisms and parameters, as well as their ability to be active and reprogrammed in an engineered system outside of their natural cellular environment.

### EXAMPLES

[0383] The invention is further described in the following examples, which do not limit the scope of the invention described in the claims.

### Example 1—Building an Expanded Database of CRISPR-Cas Systems, and Searching for Type VI-D RNA-Targeting Systems

[0384] We developed a computational pipeline to produce an expanded database of class 2 CRISPR-Cas systems from genomic and metagenomic sources. Genome and metagenome sequences were downloaded from NCBI (Benson et al., 2013; Pruitt et al., 2012), NCBI whole genome sequencing (WGS), and DOE JGI Integrated Microbial Genomes (Markowitz et al., 2012). Proteins were predicted (Meta-GeneMark (Zhu et al., 2010) using the standard model MetaGeneMark_v1.mod, and Prodigal (Hyatt et al., 2010) in anon mode) on all contigs at least 5 kb in length, and de-duplicated in favor of pre-existing annotations to construct a complete protein database. CRISPR arrays were identified and protein sequences for ORFs located within +/−10 kb from CRISPR arrays were grouped into CRISPR-proximal protein clusters. Clusters of fewer than 4 proteins, or comprising proteins from fewer than 3 contigs were discarded. Each of these remaining protein clusters were considered to be a putative effector of a CRISPR-Cas system. In addition to the CRISPR array and putative effector protein, many CRISPR-Cas systems also include additional proteins that enable adaptation, crRNA processing, and defense. Potential additional CRISPR-Cas system components associated with each of the predicted effectors were identified as clusters of protein-coding genes with high effector co-occurrence, and CRISPR enrichment or CRISPR representation of at least 15%.

[0385] Effector co-occurrence was calculated as the percentage of loci containing the effector that also contain the potential co-occurring protein. The high co-occurrence threshold was a function of the cohesiveness of the effector cluster (more homogenous clusters requiring a higher threshold). The CRISPR enrichment was calculated as follows: 1) Up to 20 unique proteins were sampled from each protein cluster, and UBLAST (Edgar, 2010) was used to generate a rank ordered list of proteins by E-value from the complete protein database, 2) An E-value threshold was imposed to recover at least 50% of the members of the cluster, and 3) CRISPR enrichment was calculated by dividing the number of CRISPR-proximal proteins below the E-value threshold by the total number of proteins below the threshold. CRISPR representation was calculated as the percentage of effector-proximal proteins in a CRISPR-proximal protein cluster. All clustering operations were performed using mmseqs2 (Steinegger and Söding, 2017).

[0386] This information was incorporated into a database of (predicted) CRISPR-Cas systems, each composed of: 1) a CRISPR array, 2) a putative effector, and optionally, 3) clusters of potential co-acting proteins. Aggregating and processing a collection of more than 10 Tb of prokaryotic genomic and metagenomic sequence data from multiple sources, our pipeline produced a database of 293,985 putative CRISPR-Cas systems. One important difference from previously reported computational pipelines (Shmakov et al., 2015, 2017a; Smargon et al., 2017) is that we perform minimal filtering (e.g., imposing a minimum size on putative effector) in the intermediate stages of the search in order to expand the range for potential discovery of novel CRISPR-Cas systems. As such, the resulting database of putative CRISPR-Cas loci includes all previously characterized class 2 CRISPR-Cas systems, but also contains a considerable amount of noise, such as degraded, non-functional CRISPR-Cas loci.

[0387] For functional characterization of this database of candidate CRISPR-Cas systems, we constructed multiple sequence alignment for each family of putative effectors using MAFFT (Katoh and Standley, 2013) and conducted an HMM search using HMMer (Eddy, 2011) against protein family databases Pfam (Finn et al., 2014) and Uniprot (Bateman et al., 2017), as well as a BLASTN search of CRISPR spacer sequences against a reference set of phages. This analysis led to the detection of protein families corresponding to all previously identified class 2 CRISPR-Cas systems, indicating a minimal false negative rate. To identify novel class 2 CRISPR-Cas systems, features included above for the prediction of the functions of putative CRISPR-Cas systems were used to rank candidate families for follow-up functional evaluation.

### Genomic Survey of Type VI-D RNA-Targeting CRISPR-Cas Systems

[0388] To expand the repertoire of Cas nucleases for RNA manipulation and sensing, we searched our database for type VI CRISPR-Cas systems with effector proteins containing two HEPN-domains each (2-HEPN proteins). In addition to the previously identified 2-HEPN proteins, Cas13a, Cas13b, and Cas13c, we detected a group of 2-HEPN proteins distantly related to Cas13a (effectors of type VI-A), primarily in Eubacterium and Ruminococcus, which we denote Cas13d. The amino acid sequences of Cas13d proteins show less than 8% identity to the most similar Cas13a sequences; nevertheless, statistically significant sequence similarity between Cas13d and Cas13a can be demonstrated using PSI-BLAST initiated with a profile made from the multiple alignment of Cas13a (E-value=0.002). This significant similarity is primarily due to the conservation of the HEPN domain sequences between Cas13a and Cas13d, whereas the remaining portions of the protein sequences in the two families are highly divergent; in particular, Cas13d proteins lack a counterpart to the Helical-1 domain of Cas13a (FIGS. 5A-C). Phylogenetic analysis of the Cas13 proteins clearly shows that Cas13a and Cas13d form strongly supported clades (FIGS. 4A-B).

[0389] Additionally, Cas13d effectors are notably smaller than previously characterized class 2 CRISPR effectors, with a median size of 928 aa. For comparison, this median size is 190 aa (17%) less than that of Cas13c, more than 200 aa (18%) less than that of Cas13b, and more than 300 aa (26%) less than that of Cas13a (FIG. 2B). Taken together, these lines of evidence suggest that this distinct group of class 2 CRISPR-Cas systems are best classified as Type VI-D, with the effector denoted Cas13d (FIG. 2A).

[0390] We found that 77% of Cas13d genes occur adjacent to CRISPR arrays, and for 19%, the adaptation module (Cas1 and Cas2 genes) is present in the vicinity (FIG. 1), suggesting that many Type VI-D loci encode CRISPR-Cas systems that are active in both adaptation and interference. Phylogenetic analysis indicates that Cas1 proteins associated with Type VI-D are monophyletic and, in accord with previous observations on other type VI systems, are affiliated with the type II-A clade (FIG. 3). Thus, in the case of type VI, the adaptation module seems to have co-evolved with the effector module.

[0391] Spacer sequences from CRISPR arrays within 3 kb of Cas13d effectors were extracted. In the case of multiple contigs containing the same Cas13d sequence (e.g., duplicated locus), only the contig containing the longest CRISPR array was used. Subsequent spacer analysis closely follows the method described previously (Shmakov et al., 2017b). Briefly, the resulting 198 spacers were de-duplicated by comparison of direct and reverse complement sequences, to produce a set of 182 unique spacers. A BLASTN (Camacho et al., 2009) search with the command line parameters -word_size 7 -gapopen 5 -gapextend 2 -reward 1 -penalty -3 was performed for the unique spacer set against a database comprising the virus and prokaryotic sequences in NCBI. To identify prophage regions, (i) all ORFs within 3 kb of prokaryotic matches were collected; (ii) a PSI-BLAST search was conducted against the proteins extracted from the virus part of NCBI, using the command line parameters -seg no -evalue 0.000001 -dbsize 20000000; and (iii) a spacer hit was classified as prophage if it overlapped with an ORF with a viral match, or if two or more ORFs with viral matches were identified within the neighborhood of the spacer hit.

[0392] The CRISPR arrays adjacent to Cas13d genes contain 198 spacers total, of which 182 are unique. A BLASTN search of the unique spacer sequences against a database comprising known phages and NCBI prokaryotic sequences revealed 7 spacers with significant hits (defined as E-value<0.0001, alignment length at least 24, 0 gaps, and no more than one mismatch). One spacer, from Ruminococcus flavefaciens FD-1, showed significant matches against the Arthrobacter dsDNA phage Gordon (alignment length=28, 1 mismatch) and against a putative prophage region in an uncultured Flavonifractor sequence (alignment length=24, 0 mismatches). A different spacer, from a gut metagenome sequence, resulted in a significant match against a putative prophage region in Bacillus soli (alignment length=24, 0 mismatches). The remaining five spacer matches targeted ORFs in prokaryotic sequences, but were not classified as being in prophage regions. The presence of spacers homologous to DNA phage genomic sequences in an RNA-targeting CRISPR-Cas system might appear unexpected but is in line with similar observations on type VI-A and type VI-B systems (Smargon et al., 2017). Presumably, type VI systems abrogate the reproduction of DNA phages by cleaving phage mRNAs, but the mechanistic details of the antivirus activity of these systems remain to be characterized experimentally.

[0393] Examination of the additional genes in the vicinity of Cas13d led to the identification in most of the VI-D loci of potential accessory proteins containing WYL domains (so denoted after three amino acids that were conserved in the originally identified group of these domains) and additionally, ribbon-helix-helix (RHH) DNA-binding domains (FIG. 6).

[0394] For phylogenetic analysis of these Cas13d-associated WYL-domain containing proteins, we compiled a data set of WYL proteins. In addition to automatically identified WYL proteins, we used PSI-BLAST (Altschul et al., 1997) to search over a local set of NCBI sourced proteins using RspWYL1 as a query. The results with E-value 0.01 or lower were added to the set of WYL proteins. Proteins smaller than 150 aa were discarded from the data set, and UCLUST (Edgar, 2010) with identity threshold 0.90 was used to obtain a non-redundant set. We then added all WYL proteins identified in the vicinity of Cas13d genes to form a set of 3908 WYL sequences for phylogenetic analysis. Multiple alignment and phylogeny of protein sequences were constructed as described previously (Peters et al., 2017).

[0395] Briefly, the sequences were clustered by similarity, and for each cluster, a multiple alignment was built using MUSCLE (Edgar, 2004). Alignments were combined into larger aligned clusters by HHalign (Yu et al., 2015) if the resulting score between the two alignments was higher than the threshold; otherwise, the scores were recorded in a similarity matrix. The matrix was used to reconstruct a UPGMA tree. For each cluster, the alignment was filtered as follows: the alignment positions with the gap character fraction values of 0.5 and homogeneity values of 0.1 or less were removed. The remaining positions were used for tree reconstruction using FastTree with the WAG evolutionary model and the discrete gamma model with 20 rate categories. The same program was used to compute SH (Shimodaira-Hasegawa)-like node support values

[0396] The WYL-domain proteins contained in Type VI-D loci fall into six strongly supported branches of the broader phylogenetic tree of WYL-domain proteins. The branch we denote WYL1 is a single WYL-domain protein associated primarily with Ruminococcus. Multiple sequence alignment of WYL1 shows an N-terminal RHH domain, as well as a pattern of primarily hydrophobic conserved residues, including an invariant tyrosine-leucine doublet corresponding to the original WYL motif (FIG. 7). Other VI-D loci contain duplicated genes encoding WYL-domain proteins, as in Ruminococcus flavefaciens, or a fusion of two WYL-domain proteins, as in Eubacterium sp. Although a substantial majority of the VI-D loci encode WYL-domain proteins, phylogenetic analysis indicates that these CRISPR-associated WYL proteins are scattered among different branches of the WYL family tree, i.e., are polyphyletic. Thus, the VI-D CRISPR-Cas systems appear to have acquired WYL-domain proteins on several independent occasions, suggesting a role for this protein in modulating the CRISPR-Cas function.

[0397] Exemplary Type VI-D CRISPR-Cas effector proteins are provided in TABLES 1 and 2 (e.g., SEQ ID NOs. 1-31, and 200-350). Exemplary Type VI-D CRISPR-Cas direct repeat sequences are provided in TABLE 3 (e.g., SEQ ID NOs 32-49, 52-77, 351-589). Exemplary Type VI-D CRISPR-Cas associated WYL accessory proteins are provided in TABLES 1, 4, 5, and 6. In some embodiments, a Type VI-D CRISPR-Cas effector protein comprises an exemplary motif provided in TABLE 7 (e.g., SEQ ID NOs: 94-98, 672 and 673).

TABLE 1
Representative Cas13d Effector and WYL1 Accessory Proteins

| | | | # | | | Effector |
|---|---|---|---|---|---|---|
| Species | Cas13d Accession | WYL1 Accession | spacers | cas1 | cas2 | size |
| Eubacterium sp. Ann11 (NZ_NFLV01000009) | NZ_NFLV01000009_111 | N/A | 9 | Y | Y | 1006 |
| Eubacterium sp. An3 (NFIR01000008) | NFIR01000008_78 | N/A | 2 | Y | Y | 1001 |
| Ruminococcus albus (NZ_FOAT01000009) | WP_074833651.1 | N/A | 6 | N | N | 944 |
| Ruminococcus bicirculans (NZ_HF545617) | WP_041337480.1 | WP_041337479.1 | 6 | N | N | 918 |
| Ruminococcus flavefaciens (DBYI01000091) | DBYI01000091_43 | N/A | 11 | Y | Y | 958 |
| Ruminococcus flavefaciens (NZ_FPJT01000005) | WP_075424065.1 | N/A | 4 | N | N | 967 |
| Ruminococcus flavefaciens FD-1 (NZ_ACOK01000100) | WP_009985792.1 | N/A | 5 | N | N | 933 |
| Ruminococcus flavefaciens FD-1 (NZ_ACOK01000100) | NZ_ACOK01000100_5 | N/A | 5 | N | N | 949 |
| Ruminococcus sp. CAG:57 (CBFS010000062) | CDC65743.1 | SCH71532.1 | 2 | N | N | 922 |
| Ruminococcus sp. N15.MGS-57 (LARF01000048) | LARF01000048_8 | LARF01000048_7 | 3 | N | N | 919 |
| Ruminococcus sp. UBA7013 (DJXD01000002) | DJXD01000002_3 | N/A | 9 | Y | Y | 877 |
| Eubacterium siraeum DSM 15702 (DS499551) | WP_005358205.1 | N/A | 18 | N | N | 954 |
| Eubacterium siraeum DSM 15702 (NZ_KB907524) | WP_005358205.1 | N/A | 7 | N | N | 954 |
| animal-digestive system-orangutan individual fecal | 3300010266 \| Ga0129314_1001134_19 | N/A | 6 | N | N | 981 |
| (3300010266 \| Ga0129314_1001134) | | | | | | |
| arthropoda-digestive system-cubitermes and | 3300006226 \| Ga0099364_10024192_5 | N/A | 13 | Y | Y | 1054 |
| nasutitermes termite gut | | | | | | |
| (3300006226 \| Ga0099364_10024192) | | | | | | |
| arthropoda-digestive system-cubitermes and | 3300006226 \| Ga0099364_10024192_5 | N/A | 13 | Y | Y | 1043 |
| nasutitermes termite gut | | | | | | |
| (3300006226 \| Ga0099364_10024192) | | | | | | |
| gut metagenome (CDTW01032418) | CDTW01032418_55 | CDTW01032418_59 | 4 | N | N | 906 |
| gut metagenome (CDYS01033339) | CDYS01033339_14 | CDYS01033339_20 | 5 | N | N | 906 |
| gut metagenome (CDYU01004315) | CDYU01004315_2 | CDYU01004315_3 | 2 | N | N | 925 |
| gut metagenome (CDYU01023067) | CDYU01023067_140 | N/A | 5 | N | N | 906 |
| gut metagenome (CDYX01024884) | CDYX01024884_4 | CDYX01024884_5 | 8 | N | N | 923 |
| gut metagenome (CDZD01043528) | CDZD01043528_308 | N/A | 4 | N | N | 906 |
| gut metagenome (CDZE01002059) | CDZE01002059_22 | CDZE01002059_21 | 8 | N | N | 923 |
| gut metagenome (CDZF01024873) | CDZF01024873_75 | N/A | 4 | N | N | 906 |
| gut metagenome (CDZF01043927) | CDZF01043927_109 | N/A | 4 | N | N | 906 |
| gut metagenome (CDZK01015063) | CDZK01015063_14 | N/A | 3 | N | N | 923 |
| gut metagenome (CDZK01015063) | CDZK01015063_14 | N/A | 3 | N | N | 921 |
| gut metagenome (CDZR01037537) | SCH71549.1 | SCH71532.1 | 2 | N | N | 922 |
| gut metagenome (CDZT01047721) | CDZT01047721_3 | WP_041337479.1 | 4 | N | N | 929 |
| gut metagenome (CDZU01022944) | CDZU01022944_3 | WP_041337479.1 | 4 | N | N | 929 |
| gut metagenome (CDZV01031905) | CDZV01031905_3 | WP_041337479.1 | 4 | N | N | 929 |
| gut metagenome (CEAA01017658) | CEAA01017658_2 | N/A | 3 | N | N | 922 |
| gut metagenome (OCTW011587266) | OCTW011587266_5 | N/A | 2 | N | N | 911 |
| gut metagenome (OCVV011003687) | OCVV011003687_3 | N/A | 7 | N | N | 947 |
| gut metagenome (OCVV011003687) | OCVV011003687_3 | N/A | 7 | N | N | 955 |
| gut metagenome (ODAI010069496) | ODAI010069496_4 | N/A | 2 | N | N | 824 |
| gut metagenome (ODAI011611274) | ODAI011611274_2 | N/A | 4 | Y | N | 1009 |
| human gut metagenome (OATA01000148) | OATA01000148_47 | OATA01000148_62 | 13 | N | N | 918 |
| human gut metagenome (OAVJ01001264) | OAVJ01001264_7 | OAVJ01001264_6 | 3 | N | N | 921 |
| human gut metagenome (OBAE01000973) | OBAE01000973_3 | OBAE01000973_4 | 5 | N | N | 923 |
| human gut metagenome (OBAI01000753) | OBAI01000753_39 | N/A | 9 | N | N | 918 |
| human gut metagenome (OBAQ01000162) | OBAQ01000162_41 | OBAQ01000162_28 | 13 | N | N | 918 |
| human gut metagenome (OBAR01000289) | OBAR01000289_55 | N/A | 9 | N | N | 922 |
| human gut metagenome (OBAS01000138) | OBAS01000138_55 | OBAS01000138_57 | 11 | N | N | 922 |
| human gut metagenome (OBCV01000332) | OBCV01000332_2 | OBCV01000332_3 | 2 | N | N | 922 |
| human gut metagenome (OBDE01000870) | OBDE01000870_1 | N/A | 5 | N | N | 796 |
| human gut metagenome (OBHU01001207) | SCJ27598.1 | SCJ27525.1 | 9 | N | N | 919 |
| human gut metagenome (OBII01002626) | OBII01002626_5 | N/A | 5 | N | N | 860 |
| human gut metagenome (OBII01002626) | OBII01002626_3 | N/A | 5 | N | N | 850 |
| human gut metagenome (OBJF01000033) | OBJF01000033_8 | N/A | 6 | N | N | 955 |
| human gut metagenome (OBJF01000033) | OBJF01000033_8 | N/A | 6 | N | N | 939 |
| human gut metagenome (OBKG01000025) | OBKG01000025_26 | OBKG01000025_25 | 8 | N | N | 922 |
| human gut metagenome (OBKR01000858) | OBKR01000858_3 | OBKR01000858_4 | 5 | N | N | 922 |
| human gut metagenome (OBVH01003037) | OBVH01003037_1 | N/A | 6 | N | N | 955 |
| human gut metagenome (OBVH01003037) | OBVH01003037_2 | N/A | 6 | N | N | 939 |
| human gut metagenome (OBVY01000267) | OBVY01000267_8 | 0BVY01000267_8 | 5 | N | N | 924 |
| human gut metagenome (OBXZ01000094) | OBXZ01000094_20 | N/A | 2 | N | N | 943 |
| human gut metagenome (OBXZ01000094) | OBXZ01000094_20 | N/A | 2 | N | N | 939 |
| human gut metagenome (OCHB01002119) | OCHB01002119_1 | OCHB01002119_2 | 2 | N | N | 925 |
| human gut metagenome (OCHC01000012) | OCHC01000012_250 | OCHC01000012_251 | 7 | N | N | 919 |
| human gut metagenome (OCHD01001741) | OCHD01001741_1 | N/A | 9 | N | N | 922 |
| human gut metagenome (OCHE01000387) | OCHE01000387_10 | OCHE01000387_8 | 5 | N | N | 922 |
| human gut metagenome (OCHK01000325) | OCHK01000325_37 | OCHK01000325_38 | 11 | N | N | 922 |
| human gut metagenome (OCHN01000290) | OCHN01000290_35 | N/A | 22 | N | N | 803 |
| human gut metagenome (OCHS01000450) | OCHS01000450_6 | N/A | 9 | N | N | 922 |
| human gut metagenome (OCHU01001749) | OCHU01001749_1 | N/A | 11 | N | N | 918 |
| human gut metagenome (OCPQ01000020) | OCPQ01000020_138 | OCPQ01000020_137 | 8 | N | N | 919 |
| human gut metagenome (OCPS01000464) | OCPS01000464_4 | OCPS01000464_5 | 4 | N | N | 919 |
| human gut metagenome (OCPU01001206) | OCPU01001206_17 | OCPU01001206_15 | 4 | N | N | 808 |
| human gut metagenome (OCPV01000148) | OCPV01000148_47 | OCPV01000148_62 | 16 | N | N | 918 |
| human gut metagenome (OCQA01000142) | OCQA01000142_55 | OCQA01000142_56 | 11 | N | N | 922 |
| human gut metagenome (OFMN01000509) | OFMN01000509_2 | N/A | 12 | N | N | 918 |
| human gut metagenome (OFMU01000310) | OFMU01000310_31 | OFMU01000310_30 | 5 | N | N | 922 |
| human gut metagenome (OFMV01000268) | OFMV01000268_25 | OFMV01000268_23 | 5 | N | N | 924 |
| human gut metagenome (OFRY01000077) | OFRY01000077_43 | OFRY01000077_29 | 11 | N | N | 918 |
| human gut metagenome (OGCM01002738) | OGCM01002738_3 | OGCM01002738_4 | 4 | N | N | 919 |
| human gut metagenome (OGCO01000353) | OGCO01000353_15 | OGCO01000353_16 | 2 | N | N | 922 |
| human gut metagenome (OGCQ01002817) | SCJ27598.1 | N/A | 7 | N | N | 919 |
| human gut metagenome (OGOC01002653) | OGOC01002653_3 | OGOC01002653_4 | 5 | N | N | 924 |
| human gut metagenome (OGOI01001249) | OGOI01001249_5 | OGOI01001249_4 | 5 | N | N | 922 |
| human gut metagenome (OGOK01000323) | OGOK01000323_15 | N/A | 10 | N | N | 921 |
| human gut metagenome (OGOL01000786) | OGOL01000786_27 | OGOL01000786_26 | 6 | N | N | 922 |
| human gut metagenome (OGOO01001137) | OGOO01001137_18 | OGOO01001137_17 | 5 | N | N | 920 |
| human gut metagenome (OGOP01001824) | OGOP01001824_10 | OGOP01001824_8 | 5 | N | N | 921 |
| human gut metagenome (OGOY01000326) | SCH71549.1 | SCH71532.1 | 2 | N | N | 922 |
| human gut metagenome (OGPA01000243) | OGPA01000243_2 | WP_041337479.1 | 4 | N | N | 929 |
| human gut metagenome (OGPB01000314) | OGPB01000314_7 | OGPB01000314_5 | 5 | N | N | 922 |
| human gut metagenome (OGPJ01000449) | OGPJ01000449_26 | OGPJ01000449_25 | 3 | N | N | 919 |
| human gut metagenome (OGPK01001709) | OGPK01001709_2 | OGPK01001709_3 | 3 | N | N | 919 |
| human gut metagenome (OGPQ01001037) | OGPQ01001037_3 | OGPQ01001037_4 | 3 | N | N | 922 |
| human gut metagenome (OGPS01000624) | OGPS01000624_23 | N/A | 12 | N | N | 954 |
| human gut metagenome (OGPS01000672) | OGPS01000672_3 | OGPS01000672_4 | 6 | N | N | 919 |
| human gut metagenome (OGPU01000173) | OGPU01000173_30 | OGPU01000173_31 | 5 | N | N | 922 |
| human gut metagenome (OGPY01000296) | SCH71549.1 | OGPY01000296_5 | 2 | N | N | 922 |
| human gut metagenome (OGQH01000331) | OGQH01000331_48 | OGQH01000331_47 | 2 | N | N | 919 |
| human gut metagenome (OGQO01007270) | OGQO01007270_2 | OGQO01007270_1 | 2 | N | N | 922 |
| human gut metagenome (OGQU01002289) | OGQU01002289_9 | OGQU01002289_8 | 5 | N | N | 924 |
| human gut metagenome (OGQV01000794) | OGQV01000794_21 | OGQV01000794_21 | 3 | N | N | 922 |
| human gut metagenome (OGQW01001429) | OGQW01001429_6 | OGQW01001429_5 | 5 | N | N | 915 |
| human gut metagenome (OGQX01000605) | OGQX01000605_8 | OGQX01000605_9 | 6 | N | N | 919 |
| human gut metagenome (OGQZ01000194) | OGQZ01000194_33 | OGQZ01000194_32 | 4 | N | N | 922 |
| human gut metagenome (OGRA01000610) | OGRA01000610_24 | OGRA01000610_25 | 5 | N | N | 922 |
| human gut metagenome (OGRE01001635) | OGRE01001635_6 | OGRE01001635_5 | 5 | N | N | 926 |
| human gut metagenome (OGRF01000967) | OGRF01000967_2 | OGRF01000967_4 | 5 | N | N | 922 |
| human gut metagenome (OGRG01000028) | OGRG01000028_3 | OGRG01000028_5 | 3 | N | N | 919 |
| human gut metagenome (OGRH01000378) | OGRH01000378_2 | N/A | 11 | N | N | 918 |
| human gut metagenome (OGRN01001989) | OGRN01001989_2 | N/A | 8 | N | N | 925 |
| human gut metagenome (OGRQ01003333) | OGRQ01003333_5 | OGRQ01003333_4 | 7 | N | N | 923 |
| human gut metagenome (OGRT01000617) | OGRT01000617_3 | OGRT01000617_5 | 5 | N | N | 921 |
| human gut metagenome (OGRU01000829) | OGRU01000829_2 | OGRU01000829_3 | 5 | N | N | 915 |
| human gut metagenome (OGSD01001176) | OGSD01001176_18 | OGSD01001176_17 | 3 | N | N | 922 |
| human gut metagenome (OGUL01000592) | OGUL01000592_19 | OGUL01000592_6 | 7 | N | N | 918 |
| human gut metagenome (OGWY01002732) | OGWY01002732_3 | N/A | 10 | N | N | 952 |
| human gut metagenome (OGXI01000433) | OGXI01000433_6 | OGXI01000433_8 | 5 | N | N | 922 |
| human gut metagenome (OGXJ01002463) | OGXJ01002463_5 | OGXJ01002463_4 | 2 | N | N | 922 |
| human gut metagenome (OGXL01002096) | OGXL01002096_10 | OGXL01002096_9 | 4 | N | N | 923 |
| human gut metagenome (OGYD01000683) | OGYD01000683_23 | OGYD01000683_21 | 2 | N | N | 919 |
| human gut metagenome (OGYL01002810) | OGYL01002810_3 | WP_041337479.1 | 3 | N | N | 925 |
| human gut metagenome (OGYU01002161) | OGYU01002161_4 | OGYU01002161_2 | 5 | N | N | 922 |
| human gut metagenome (OGYY01000371) | OGYY01000371_37 | OGYY01000371_36 | 4 | N | N | 922 |
| human gut metagenome (OGZC01000639) | OGZC01000639_10 | N/A | 12 | N | N | 984 |
| human gut metagenome (OHAI01000724) | OHAI01000724_7 | OHAI01000724_6 | 5 | N | N | 922 |
| human gut metagenome (OHAJ01000052) | OHAJ01000052_20 | N/A | 3 | N | N | 956 |
| human gut metagenome (OHAN01001071) | OHAN01001071_11 | OHAN01001071_10 | 4 | N | N | 922 |
| human gut metagenome (OHAR01000226) | OHAR01000226_9 | OHAR01000226_10 | 3 | N | N | 926 |
| human gut metagenome (OHBL01000590) | OHBL01000590_7 | OHBL01000590_6 | 5 | N | N | 919 |
| human gut metagenome (OHBM01000552) | OHBM01000552_13 | OHBM01000552_14 | 2 | N | N | 922 |
| human gut metagenome (OHBP01000023) | OHBP01000023_129 | SCH71532.1 | 3 | N | N | 922 |
| human gut metagenome (OHBQ01000429) | OHBQ01000429_2 | N/A | 3 | N | N | 928 |
| human gut metagenome (OHBW01001448) | OHBW01001448_1 | OHBW01001448_2 | 5 | N | N | 924 |
| human gut metagenome (OHCE01000125) | OHCE01000125_17 | OHCE01000125_19 | 6 | N | N | 918 |
| human gut metagenome (OHCH01000211) | OHCH01000211_3 | OHCH01000211_4 | 4 | N | N | 922 |
| human gut metagenome (OHCP01000044) | OHCP01000044_27 | N/A | 6 | Y | N | 1023 |
| human gut metagenome (OHCW01000317) | OHCW01000317_3 | OHCW01000317_6 | 8 | N | N | 921 |
| human gut metagenome (OHDC01002972) | OHDC01002972_3 | N/A | 6 | N | N | 921 |
| human gut metagenome (OHDP01000241) | OHDP01000241_4 | N/A | 19 | N | N | 954 |
| human gut metagenome (OHDS01000019) | OHDS01000019_133 | SCH71532.1 | 3 | N | N | 922 |
| human gut metagenome (OHDT01000502) | OHDT01000502_2 | N/A | 2 | N | N | 925 |
| human gut metagenome (OHEG01001211) | OHEG01001211_2 | OHEG01001211_3 | 4 | N | N | 924 |
| human gut metagenome (OHEL01001488) | OHEL01001488_6 | OHEL01001488_5 | 3 | N | N | 928 |
| human gut metagenome (OHFA01000290) | OHFA01000290_5 | N/A | 21 | N | N | 954 |
| human gut metagenome (OHFV01000201) | OHFV01000201_5 | N/A | 19 | N | N | 954 |
| human gut metagenome (OHFX01001477) | OHFX01001477_3 | OHFX01001477_2 | 3 | N | N | 922 |
| human gut metagenome (OHGN01001355) | OHGN01001355_3 | N/A | 3 | N | N | 926 |
| human gut metagenome (OHGX01000264) | OHGX01000264_3 | OHGX01000264_3 | 4 | N | N | 925 |
| human gut metagenome (OHHD01000480) | OHHD01000480_3 | OHHD01000480_4 | 3 | N | N | 926 |
| human gut metagenome (OHHR01000227) | OHHR01000227_3 | OHHR01000227_4 | 5 | N | N | 922 |
| human gut metagenome (OHIB01002708) | OHIB01002708_3 | N/A | 3 | N | N | 818 |
| human gut metagenome (OHIJ101000315) | OHIJ01000315_7 | OHIJ01000315_5 | 5 | N | N | 922 |
| human gut metagenome (OHJG01000198) | OHJG01000198_33 | OHJG01000198_31 | 4 | N | N | 918 |
| human gut metagenome (OHJJ101000127) | OHJJ01000127_35 | OHJJ01000127_33 | 6 | N | N | 918 |
| human gut metagenome (OHJK01001285) | OHJK01001285_9 | N/A | 10 | N | N | 1001 |
| human gut metagenome (OHJS01001864) | OHJS01001864_3 | OHJS01001864_5 | 5 | N | N | 921 |
| human gut metagenome (OHJT01001977) | OHJT01001977_4 | N/A | 4 | N | N | 954 |
| human gut metagenome (OHJZ01000157) | OHJZ01000157_5 | N/A | 21 | N | N | 954 |
| human gut metagenome (OHKC01000402) | OHKC01000402_5 | OHKC01000402_6 | 3 | N | N | 926 |
| human gut metagenome (OHKH01000861) | OHKH01000861_3 | OHKH01000861_2 | 3 | N | N | 928 |
| human gut metagenome (OHKW01000215) | OHKW01000215_41 | OHKW01000215_38 | 8 | N | N | 921 |
| human gut metagenome (OHLH01003112) | OHLH01003112_3 | N/A | 5 | N | N | 921 |
| human gut metagenome (OHLO01000586) | OHLO01000586_3 | OHLO01000586_4 | 5 | N | N | 919 |
| human gut metagenome (OHLY01001101) | OHLY01001101_3 | N/A | 10 | N | N | 954 |
| human gut metagenome (OHME01000303) | OHME01000303_3 | OHME01000303_4 | 4 | N | N | 925 |
| human gut metagenome (OHMF01000395) | OHMF01000395_24 | OHMF01000395_25 | 3 | N | N | 923 |
| human gut metagenome (OHMH01000024) | OHMH01000024_3 | SCH71532.1 | 3 | N | N | 922 |
| human gut metagenome (OHMQ01000465) | OHMQ01000465_4 | OHMQ01000465_2 | 5 | N | N | 922 |
| human gut metagenome (OHMW01000451) | OHMW01000451_18 | OHMW01000451_20 | 3 | N | N | 922 |
| human gut metagenome (OHNF01001864) | OHNF01001864_4 | OHNF01001864_6 | 3 | N | N | 922 |
| human gut metagenome (OHNP01000278) | OHNP01000278_34 | OHNP01000278_33 | 4 | N | N | 925 |
| human gut metagenome (OHOI01000307) | OHOI01000307_2 | OHOI01000307_3 | 4 | N | N | 925 |
| human gut metagenome (OHOK01001322) | OHOK01001322_2 | OHOK01001322_3 | 5 | N | N | 923 |
| human gut metagenome (OHPC01000165) | OHPC01000165_40 | OHPC01000165_39 | 5 | N | N | 922 |
| human gut metagenome (OHPD01001131) | OHPD01001131_4 | N/A | 8 | N | N | 954 |
| human gut metagenome (OHPE01000834) | OHPE01000834_1 | N/A | 5 | N | N | 922 |
| human gut metagenome (OHPP01000240) | OHPP01000240_36 | OHPP01000240_35 | 8 | N | N | 921 |
| human gut metagenome (OHPW01002065) | OHPW01002065_2 | N/A | 10 | N | N | 954 |
| human gut metagenome (OHQE01002584) | OHQE01002584_3 | N/A | 3 | N | N | 922 |
| human gut metagenome (OHRD01000126) | OHRD01000126_17 | OHRD01000126_19 | 7 | N | N | 918 |
| human gut metagenome (OHRM01001189) | OHRM01001189_3 | OHRM01001189_5 | 8 | N | N | 921 |
| human gut metagenome (OHSG01000119) | OHSG01000119_6 | OHSG01000119_5 | 2 | N | N | 924 |
| human gut metagenome (OHSI01000544) | OHSI01000544_10 | N/A | 15 | N | N | 1001 |
| human gut metagenome (OHSM01000196) | OHSM01000196_10 | N/A | 6 | Y | N | 1023 |
| human gut metagenome (OHSQ01001407) | OHSQ01001407_1 | OHSQ01001407_2 | 5 | N | N | 924 |
| human gut metagenome (OHST01000977) | OHST01000977_4 | N/A | 13 | N | N | 954 |
| human gut metagenome (OHSZ01000559) | OHSZ01000559_4 | OHSZ01000559_5 | 5 | N | N | 919 |
| human gut metagenome (OHTG01000221) | OHTG01000221_40 | OHTG01000221_38 | 8 | N | N | 921 |
| human gut metagenome (OHTH01000201) | OHTH01000201_42 | OHTH01000201_39 | 8 | N | N | 921 |
| human gut metagenome (OHUA01000395) | OHUA01000395_26 | OHUA01000395_24 | 5 | N | N | 923 |
| human gut metagenome (OHUN01000170) | OHUN01000170_40 | OHUN01000170_39 | 5 | N | N | 922 |
| human gut metagenome (OHUP01000072) | SCJ27598.1 | SCJ27525.1 | 7 | N | N | 919 |
| human gut metagenome (OHUY01000263) | OHUY01000263_2 | OHUY01000263_5 | 7 | N | N | 919 |
| human gut metagenome (OHVU01001109) | OHVU01001109_1 | N/A | 5 | N | N | 919 |
| human gut metagenome (OHWI01000399) | SCJ27598.1 | SCJ27525.1 | 4 | N | N | 919 |
| human gut metagenome (OHXU01000245) | SCJ27598.1 | SCJ27525.1 | 6 | N | N | 919 |
| human gut metagenome (OHXZ01000057) | OHXZ01000057_25 | OHXZ01000057_26 | 7 | N | N | 919 |
| human gut metagenome (OHYD01000532) | SCJ27598.1 | N/A | 4 | N | N | 919 |
| human gut metagenome (OHYU01000376) | OHYU01000376_4 | OHYU01000376_6 | 7 | N | N | 919 |
| human gut metagenome (OIBL01000128) | SCH71549.1 | N/A | 2 | N | N | 922 |
| human gut metagenome (OIBN01003740) | OIBN01003740_1 | N/A | 7 | N | N | 919 |
| human gut metagenome (OICI01000194) | OICI01000194_18 | OICI01000194_16 | 7 | N | N | 919 |
| human gut metagenome (OIDC01000397) | OIDC01000397_3 | OIDC01000397_5 | 5 | N | N | 919 |
| human gut metagenome (OIDU01000174) | OIDU01000174_25 | N/A | 5 | N | N | 919 |
| human gut metagenome (OIEE01000042) | OIEE01000042_11 | OIEE01000042_12 | 5 | N | N | 922 |
| human gut metagenome (OIEL01000292) | OIEL01000292_3 | WP_041337479.1 | 4 | N | N | 925 |
| human gut metagenome (OIEN01002196) | OIEN01002196_3 | N/A | 8 | Y | Y | 933 |
| human gut metagenome (OIGD01000177) | OIGD01000177_59 | OIGD01000177_43 | 14 | N | N | 918 |
| human gut metagenome (OIXA01002812) | OIXA01002812_3 | OIXA01002812_2 | 3 | N | N | 929 |
| human gut metagenome (OIXU01000818) | OIXU01000818 _5 | N/A | 2 | N | N | 955 |
| human gut metagenome (OIXU01000818) | OIXU01000818 _6 | N/A | 2 | N | N | 939 |
| human gut metagenome (OIXV01006344) | OIXV01006344_7 | N/A | 11 | N | N | 918 |
| human gut metagenome (OIYU01000175) | OIYU01000175_4 | OIYU01000175_5 | 4 | N | N | 921 |
| human gut metagenome (OIZA01000315) | OIZA01000315_9 | N/A | 3 | N | N | 945 |
| human gut metagenome (OIZB01000622) | OIZB01000622_13 | N/A | 3 | N | N | 923 |
| human gut metagenome (OIZB01000622) | OIZB01000622_13 | N/A | 3 | N | N | 921 |
| human gut metagenome (OIZI01000180) | OIZI01000180_12 | N/A | 3 | N | N | 963 |
| human gut metagenome (OIZI01000180) | OIZI01000180_12 | N/A | 3 | N | N | 947 |
| human gut metagenome (OIZU01000200) | OIZU01000200_48 | WP_041337479.1 | 6 | N | N | 929 |
| human gut metagenome (OIZW01000344) | OIZW01000344_20 | OIZW01000344_21 | 4 | N | N | 922 |
| human gut metagenome (OIZX01000427) | OIZX01000427 _25 | N/A | 4 | N | N | 961 |
| human gut metagenome (OIZX01000427) | OIZX01000427 _26 | N/A | 4 | N | N | 977 |
| human gut metagenome (OJMG01000332) | OJMG01000332_24 | WP_041337479.1 | 6 | N | N | 925 |
| human gut metagenome (OJMI01000733) | OJMI01000733_4 | OJMI01000733_5 | 5 | N | N | 922 |
| human gut metagenome (OJMJ01002228) | OJMJ01002228_5 | OJMJ01002228_2 | 5 | N | N | 919 |
| human gut metagenome (OJMK01000275) | OJMK01000275_31 | N/A | 6 | N | N | 939 |
| human gut metagenome (OJMM01002900) | OJMM01002900_7 | N/A | 6 | Y | N | 980 |
| human gut metagenome (OJMM01002900) | OJMM01002900_7 | N/A | 6 | Y | N | 979 |
| human gut metagenome (OJMN01000417) | OJMN01000417_22 | OJMN01000417_21 | 3 | N | N | 920 |
| human gut metagenome (OJNI01000536) | OJNI01000536_4 | OJNI01000536_5 | 3 | N | N | 920 |
| human gut metagenome (OJNR01001167) | OJNR01001167_9 | N/A | 5 | N | N | 954 |
| human gut metagenome (OJNS01001527) | OJNS01001527_9 | N/A | 2 | N | N | 954 |
| human gut metagenome (OJNT01000812) | OJNT01000812_6 | OJNT01000812_5 | 5 | N | N | 922 |
| human gut metagenome (OJOE01000269) | OJOE01000269_30 | OJOF01000269_29 | 5 | N | N | 922 |
| human gut metagenome (OJOH01001697) | SCH71549.1 | OJOH01001697_5 | 2 | N | N | 922 |
| human gut metagenome (OJOL01000697) | OJOL01000697_12 | OJOL01000697_13 | 5 | N | N | 922 |
| human gut metagenome (OJOP01001093) | OJOP01001093_3 | N/A | 5 | N | N | 954 |
| human gut metagenome (OJPG01000139) | OJPG01000139_73 | OJPG01000139_77 | 3 | N | N | 918 |
| human gut metagenome (OJPS01000131) | OJPS01000131_3 | OJPS01000131_4 | 3 | N | N | 918 |
| human gut metagenome (OJPX01000614) | OJPX01000614_4 | OJPX01000614_6 | 3 | N | N | 920 |
| human gut metagenome (OJQH01000635) | OJQH01000635_3 | OJQH01000635_4 | 3 | N | N | 918 |
| human gut metagenome (OJRG01001951) | OJRG01001951_4 | N/A | 3 | N | N | 920 |
| human gut metagenome (OJRP01000045) | OJRP01000045_31 | OJRP01000045_30 | 5 | N | N | 918 |
| human gut metagenome (OKRZ01002949) | OKRZ01002949_5 | OKRZ01002949_4 | 3 | N | N | 922 |
| human gut metagenome (OKSB01002689) | OKSB01002689_10 | OKSB01002689_10 | 4 | N | N | 922 |
| human gut metagenome (OKSC01004083) | OKSC01004083_2 | N/A | 2 | N | N | 906 |
| human gut metagenome (OKSD01002505) | OKSD01002505_11 | OKSD01002505_10 | 2 | N | N | 922 |
| human gut metagenome (OKSK01000361) | OKSK01000361_17 | OKSK01000361_20 | 3 | N | N | 922 |
| human gut metagenome (OKSNO1001169) | OKSNO1001169_3 | N/A | 13 | N | N | 1001 |
| human gut metagenome (OKSP01001453) | OKSP01001453_2 | N/A | 13 | N | N | 954 |
| human gut metagenome (OKSV01000264) | OKSV01000264_32 | OKSV01000264_31 | 5 | N | N | 922 |
| human gut metagenome (OKTJ01001834) | OKTJ01001834_4 | N/A | 6 | N | N | 921 |
| human gut metagenome (OKTR01000164) | OKTR01000164_10 | N/A | 6 | Y | N | 1023 |
| human gut metagenome (OKTU01000352) | OKTU01000352_17 | OKTU01000352_19 | 3 | N | N | 922 |
| human gut metagenome (OKUL01000400) | OKUL01000400_17 | OKUL01000400_16 | 7 | N | N | 919 |
| human gut metagenome (OKUR01000327) | OKUR01000327_17 | OKUR01000327_16 | 5 | N | N | 919 |
| human gut metagenome (OKVB01000375) | OKVB01000375_17 | OKVB01000375_16 | 7 | N | N | 919 |
| human gut metagenome (OKVC01000355) | OKVC01000355_17 | OKVC01000355_16 | 4 | N | N | 919 |
| human gut metagenome (OKVF01000105) | OKVF01000105_32 | OKVF01000105_31 | 5 | N | N | 922 |
| human gut metagenome (OKVK01000317) | SCH71549.1 | OKVK01000317_4 | 2 | N | N | 922 |
| human gut metagenome (OLFT01003273) | OLFT01003273_1 | OLFT01003273_2 | 3 | N | N | 925 |
| human gut metagenome (OLGH01000826) | OLGH01000826_1 | OLGH01000826_4 | 5 | N | N | 924 |
| human gut metagenome (OLGN01000304) | OLGN01000304_32 | OLGN01000304_31 | 9 | N | N | 920 |
| human gut metagenome (OLHE01000257) | OLHE01000257_41 | OLHE01000257_40 | 2 | N | N | 923 |
| human gut metagenome (PPYE01106492) | PPYE01106492_34 | PPYE01106492_32 | 2 | N | N | 922 |
| human gut metagenome (PPYE01385196) | PPYE01385196_3 | PPYE01385196_4 | 3 | N | N | 925 |
| human gut metagenome (PPYE01512733) | PPYE01512733_3 | PPYE01512733_2 | 4 | N | N | 919 |
| human gut metagenome (PPYF01129432) | PPYF01129432_15 | N/A | 9 | N | N | 918 |
| human gut metagenome (PPYF01670242) | PPYF01670242_39 | PPYF01670242_38 | 10 | N | N | 919 |
| human metagenome (ODEE01001565) | ODEE01001565_1 | N/A | 6 | N | N | 919 |
| human metagenome (ODFV01004017) | ODFV01004017_1 | N/A | 6 | N | N | 921 |
| human metagenome (ODFW01000112) | ODFW01000112_43 | ODFW01000112_41 | 5 | N | N | 924 |
| human metagenome (ODGN01000188) | ODGN01000188_50 | ODGN01000188_49 | 2 | N | N | 919 |
| human metagenome (ODHH01000275) | ODHH01000275_14 | ODHH01000275_15 | 4 | N | N | 919 |
| human metagenome (ODHP01001712) | ODHP01001712_3 | ODHP01001712_4 | 4 | N | N | 918 |
| human metagenome (ODHV01000466) | ODHV01000466_16 | ODHV01000466_16 | 5 | N | N | 925 |
| human metagenome (ODHZ01001211) | ODHZ01001211_7 | ODHZ01001211_6 | 5 | N | N | 921 |
| human metagenome (ODIH01000145) | ODIH01000145_73 | N/A | 2 | N | N | 919 |
| human metagenome (ODJZ01000182) | ODJZ01000182_13 | ODJZ01000182_15 | 2 | N | N | 921 |
| human metagenome (ODKA01005851) | ODKA01005851_3 | N/A | 6 | N | N | 924 |
| human metagenome (ODLN01002572) | ODLN01002572_7 | N/A | 8 | N | N | 924 |
| human metagenome (ODQJ01000729) | ODQJ01000729_25 | N/A | 9 | N | N | 919 |
| human metagenome (ODTU01003882) | ODTU01003882_3 | ODTU01003882_4 | 5 | N | N | 924 |
| human metagenome (ODUN01000242) | ODUN01000242_23 | ODUN01000242_22 | 3 | N | N | 922 |
| human metagenome (ODVQ01003982) | ODVQ01003982_3 | ODVQ01003982_4 | 5 | N | N | 919 |
| human metagenome (ODVR01002077) | ODVR01002077_3 | ODVR01002077_4 | 4 | N | N | 922 |
| human metagenome (ODVS01001471) | ODVS01001471_9 | ODVS01001471_8 | 5 | N | N | 924 |
| human metagenome (ODWX01000843) | ODWX01000843_3 | ODWX01000843_2 | 3 | N | N | 922 |
| human metagenome (ODXC01000747) | ODXC01000747_3 | ODXC01000747_4 | 2 | N | N | 922 |
| human metagenome (ODXE01000717) | ODXE01000717_15 | ODXE01000717_17 | 5 | N | N | 925 |
| human metagenome (ODXO01005124) | ODXO01005124_2 | ODXO01005124_1 | 3 | N | N | 922 |
| human metagenome (ODXP01000624) | ODXP01000624_4 | ODXP01000624_4 | 5 | N | N | 919 |
| human metagenome (ODYC01000377) | ODYC01000377_16 | ODYC01000377_17 | 5 | N | N | 924 |
| human metagenome (ODYJ01000298) | ODYJ01000298_33 | ODYJ01000298_33 | 4 | N | N | 919 |
| human metagenome (OEBA01002798) | OEBA01002798_7 | OEBA01002798_6 | 5 | N | N | 922 |
| human metagenome (OEEK01000163) | OEEK01000163_43 | OEEK01000163_44 | 5 | N | N | 922 |
| human metagenome (OEFH01000394) | OEFH01000394_40 | OEFH01000394_36 | 2 | N | N | 922 |
| human metagenome (OEFW01000634) | OEFW01000634_7 | OEFW01000634_8 | 5 | N | N | 922 |
| human metagenome (OEHT01000244) | OEHT01000244_15 | OEHT01000244_17 | 5 | N | N | 922 |
| human metagenome (OEJW01000623) | OEJW01000623_11 | OEJW01000623_13 | 6 | N | N | 922 |
| human-digestive system-homo sapiens | 3300007296 \| Ga0104830_100502_31 | 3300007296 \| Ga0104830_100502_30 | 5 | N | N | 919 |
| (3300007296 \| Ga0104830_100502) | | | | | | |
| human-digestive system-homo sapiens | 3300007299 \| Ga0104319_1000623_29 | 3300007299 \| Ga0104319_1000623_28 | 8 | N | N | 924 |
| (3300007299 \| Ga0104319_1000623) | | | | | | |
| human-digestive system-homo sapiens | 3300007361 \| Ga0104787_100954_14 | N/A | 3 | N | N | 923 |
| (3300007361 \| Ga0104787_100954) | | | | | | |
| human-digestive system-homo sapiens | 3300007361 \| Ga0104787_100954_14 | N/A | 3 | N | N | 921 |
| (3300007361 \| Ga0104787_100954) | | | | | | |
| human-digestive system-homo sapiens | 3300008272 \| Ga0111092_1001379_1 | N/A | 3 | N | N | 921 |
| (3300008272 \| Ga0111092_1001379) | | | | | | |
| human-digestive system-homo sapiens | 3300008496 \| Ga0115078_100057_51 | 3300008496 \| Ga0115078_100057_50 | 3 | N | N | 922 |
| (3300008496 \| Ga0115078_100057) | | | | | | |
| mammals-digestive system-asian elephant fecal- | 3300001598 \| EMG_10000232_1 | N/A | 2 | N | N | 963 |
| elephas maximus (3300001598 \| EMG_10000232) | | | | | | |
| mammals-digestive system-asian elephant fecal- | 3300001598 \| EMG_10003641_1 | N/A | 11 | Y | N | 1057 |
| elephas maximus (3300001598 \| EMG_10003641) | | | | | | |
| mammals-digestive system-feces | 3300018475 \| Ga0187907_10006632_17 | N/A | 18 | Y | Y | 977 |
| (3300018475 \| Ga0187907_10006632) | | | | | | |
| mammals-digestive system-feces | 3300018475 \| Ga0187907_10006632_17 | N/A | 18 | Y | Y | 971 |
| (3300018475 \| Ga0187907_10006632) | | | | | | |
| mammals-digestive system-feces | 3300018493 \| Ga0187909_10005433_18 | N/A | 18 | Y | Y | 977 |
| (3300018493 \| Ga0187909_10005433) | | | | | | |
| mammals-digestive system-feces | 3300018493 \| Ga0187909_10005433_18 | N/A | 18 | Y | Y | 971 |
| (3300018493 \| Ga0187909_10005433) | | | | | | |
| mammals-digestive system-feces | 3300018493 \| Ga0187909_10024847_5 | N/A | 4 | N | N | 1141 |
| (3300018493 \| Ga0187909_10024847) | | | | | | |
| mammals-digestive system-feces | 3300018493 \| Ga0187909_10030832_9 | N/A | 10 | N | N | 927 |
| (3300018493 \| Ga0187909_10030832) | | | | | | |
| mammals-digestive system-feces | 3300018494 \| Ga0187911_10005861_19 | N/A | 18 | Y | Y | 977 |
| (3300018494 \| Ga0187911_10005861) | | | | | | |
| mammals-digestive system-feces | 3300018494 \| Ga0187911_10005861_18 | N/A | 18 | Y | Y | 971 |
| (3300018494 \| Ga0187911_10005861) | | | | | | |
| mammals-digestive system-feces | 3300018494 \| Ga0187911_10019634_9 | N/A | 11 | N | N | 927 |
| (3300018494 \| Ga0187911_10019634) | | | | | | |
| mammals-digestive system-feces | 3300018494 \| Ga0187911_10037073_4 | N/A | 4 | N | N | 1141 |
| (3300018494 \| Ga0187911_10037073) | | | | | | |
| mammals-digestive system-feces | 3300018494 \| Ga0187911_10069260_3 | N/A | 2 | N | N | 900 |
| (3300018494 \| Ga0187911_10069260) | | | | | | |
| mammals-digestive system-feces | 3300018495 \| Ga0187908_10006038_18 | N/A | 18 | Y | Y | 977 |
| (3300018495 \| Ga0187908_10006038) | | | | | | |
| mammals-digestive system-feces | 3300018495 \| Ga0187908_10006038_19 | N/A | 18 | Y | Y | 971 |
| (3300018495 \| Ga0187908_10006038) | | | | | | |
| mammals-digestive system-feces | 3300018495 \| Ga0187908_10013323_2 | N/A | 4 | N | N | 1141 |
| (3300018495 \| Ga0187908_10013323) | | | | | | |
| mammals-digestive system-feces | 3300018878 \| Ga0187910_10006931_17 | N/A | 18 | Y | Y | 977 |
| (3300018878 \| Ga0187910_10006931) | | | | | | |
| mammals-digestive system-feces | 3300018878 \| Ga0187910_10006931_17 | N/A | 18 | Y | Y | 971 |
| (3300018878 \| Ga0187910_10006931) | | | | | | |
| mammals-digestive system-feces | 3300018878 \| Ga0187910_10015336_15 | N/A | 4 | N | N | 1141 |
| (3300018878 \| Ga0187910_10015336) | | | | | | |
| mammals-digestive system-feces | 3300018878 \| Ga0187910_10040531_1 | N/A | 3 | N | N | 927 |
| (3300018878 \| Ga0187910_10040531) | | | | | | |
| mammals-digestive system-feces | 3300019376 \| Ga0187899_10021543_4 | N/A | 4 | N | N | 880 |
| (3300019376 \| Ga0187899_10021543) | | | | | | |
| metagenome (OGCZ01001955) | OGCZ01001955_1 | N/A | 4 | N | N | 926 |
| metagenome (OGDS01000069) | OGDS01000069_10 | N/A | 3 | N | N | 956 |
| metagenome (OGDY01002059) | OGDY01002059_17 | N/A | 10 | N | N | 952 |
| metagenome (OGEU01000713) | OGEU01000713_24 | OGEU01000713_23 | 6 | N | N | 923 |
| metagenome (OGFM01002125) | OGFM01002125_3 | OGFM01002125_4 | 6 | N | N | 928 |
| metagenome (OGGS01001705) | OGGS01001705_3 | OGGS01001705_5 | 5 | N | N | 922 |
| metagenome (OGGV01005531) | OGGV01005531_2 | N/A | 2 | N | N | 922 |
| metagenome (OGHW01002048) | OGHW01002048_1 | OGHW01002048_2 | 4 | N | N | 922 |
| metagenome (OGIE01002059) | OGIE01002059_21 | OGIE01002059_22 | 4 | N | N | 922 |
| metagenome (OGII01000819) | OGII01000819_21 | OGII01000819_22 | 4 | N | N | 922 |
| metagenome (OGJI01000038) | OGJI01000038 151 | OGJI01000038_150 | 2 | N | N | 926 |
| metagenome (OGJK01007642) | OGJK01007642_2 | N/A | 2 | N | N | 925 |
| metagenome (OGJY01000516) | OGJY01000516_18 | OGJY01000516_19 | 6 | N | N | 925 |
| metagenome (OGKA01000617) | OGKA01000617_2 | OGKA01000617_3 | 3 | N | N | 919 |
| metagenome (OGKE01000029) | OGKE01000029_151 | OGKE01000029_150 | 2 | N | N | 926 |
| metagenome (OGKG01000020) | OGKG01000020_152 | OGKG01000020_150 | 2 | N | N | 926 |
| metagenome (UGKG01002483) | OGKG01002483_14 | N/A | 7 | N | N | 954 |
| metagenome (OGKW01000585) | OGKW01000585_4 | OGKW01000585_4 | 4 | N | N | 918 |
| metagenome (OGLJ01000192) | OGLJ01000192_54 | OGLJ01000192_55 | 3 | N | N | 925 |
| metagenome (OGLM01001314) | OGLM01001314_21 | N/A | 20 | N | N | 954 |
| metagenome (OGMO01000062) | OGMO01000062_69 | OGMO01000062_68 | 6 | N | N | 925 |
| metagenome (OGMP01001167) | OGMP01001167_15 | OGMP01001167_14 | 6 | N | N | 921 |
| metagenome (OGNV01000836) | OGNV01000836_4 | OGNV01000836_6 | 3 | N | N | 922 |
| metagenome (OGUJ01000114) | OGUJ01000114_43 | N/A | 9 | N | N | 941 |
| metagenome (OGUJ01000114) | OGUJ01000114_45 | N/A | 9 | N | N | 937 |
| metagenome (OJKY01000879) | OJKY01000879_3 | N/A | 12 | Y | N | 1023 |
| metagenome (OLJF01000187) | OLJF01000187_58 | N/A | 5 | N | N | 922 |
| uncultured Clostridiales bacterium (OMWO01000091) | OMWO01000091_3 | N/A | 4 | N | N | 880 |
| uncultured Ruminococcus sp. (FMFL01000053) | SCJ27598.1 | SCJ27525.1 | 10 | N | N | 919 |

TABLE 2
Amino Acid Sequences of Cas13d Effector Proteins

>LARF01000048_8
[Ruminococcus sp. N15.MGS-57]
MAKKNKMKPRELREAQKKARQLKAAEINNNAAPAIAAMPAAEVIAPVAEKKKSSVKAAGMKSILVSKNKMYITSFGKGNSAVLE
YEVDNNDYNQTQLSSKGSSNIELRGVNEVNITFSSKHGFESGVEINTSNPTHRSGESSPVRGDMLGLKSELEKRFFGKTFDDNI
HIQLIYNILDIEKILAVYVTNIVYALNNMLSIKDSESYDDFMGYLSARNTYEVFTHPDKSNLSDKAKGNIKKSFSTFNDLLKTK
RLGYFGLEEPKTKDTRVSQAYKKRVYHMLAIVGQIRQSVFHDKSSKLDEDLYSFIDIIDSEYRETLDYLVDERFDSINKGFIQG
NKVNISLLIDMMKGYEADDIIRLYYDFIVLKSQKNLGFSIKKLREKMLDEYGFRFKDKQYDSVRSKMYKLMDFLLFCNYYRNDV
VAGEALVRKLRFSMTDDEKEGIYADEASKLWGKFRNDFENIADHMNGDVIKELGKADMDFDEKILDSEKKNASDLLYFSKMIYM
LTYFLDGKEINDLLTTLISKFDNIKEFLKIMKSSAVDVECELTAGYKLFNDSQRITNELFIVKNIASMRKPASSAKLTMFRDAL
TILGIDDNITDDRISEILKLKEKGKGIHGLRNFITNNVIESSRFVYLIKYANAQKIRKVAKNEKVVMFVLGGIPDTQIERYYKS
CVEFPDMNSSLEVKRSELARMIKNISFDDFKNVKQQAKGRENVAKERAKAVIGLYLTVMYLLVKNLVNVNARYVIAIHCLERDF
GLYKEIIPELASKNLKNDYRILSQTLCELCDKSPNLFLKKNERLRKCVEVDINNADSSMTRKYRNCIAHLTVVRELKEYIGDIR
TVDSYFSIYHYVMQRCITKRENDTKQEEKIKYEDDLLKNHGYTKDFVKALNSPFGYNIPRFKNLSIEQLFDRNEYLTEK (SEQ
ID NO: 2)
>WP_005358205.1
[[Eubacterium] siraeum DSM 15702]
MGKKIHARDLREQRKTDRTEKFADQNKKREAERAVPKKDAAVSVKSVSSVSSKKDNVTKSMAKAAGVKSVFAVGNTVYMTSFGR
GNDAVLEQKIVDTSHEPLNIDDPAYQLNVVTMNGYSVTGHRGETVSAVTDNPLRRFNGRKKDEPEQSVPTDMLCLKPTLEKKFF
GKEFDDNIHIQLIYNILDIEKILAVYSTNAIYALNNMSADENIENSDFFMKRTTDETFDDFEKKKESTNSREKADFDAFEKFIG
NYRLAYFADAFYVNKKNPKGKAKNVLREDKELYSVLTLIGKLRHWCVHSEEGRAEFWLYKLDELKDDFKNVLDVVYNRPVEEIN
NRFIENNKVNIQILGSVYKNTDIAELVRSYYEFLITKKYKNMGFSIKKLRESMLEGKGYADKEYDSVRNKLYQMTDFILYTGYI
NEDSDRADDLVNTLRSSLKEDDKTTVYCKEADYLWKKYRESIREVADALDGDNIKKLSKSNIEIQEDKLRKCFISYADSVSEFT
KLIYLLTRFLSGKEINDLVTTLINKFDNIRSFLEIMDELGLDRTFTAEYSFFEGSTKYLAELVELNSFVKSCSFDINAKRTMYR
DALDILGIESDKTEEDIEKMIDNILQIDANGDKKLKKNNGLRNFIASNVIDSNRFKYLVRYGNPKKIRETAKCKPAVRFVLNEI
PDAQIERYYEACCPKNTALCSANKRREKLADMIAEIKFENFSDAGNYQKANVTSRTSEAEIKRKNQAIIRLYLTVMYIMLKNLV
NVNARYVIAFHCVERDTKLYAESGLEVGNIEKNKTNLTMAVMGVKLENGIIKTEFDKSFAENAANRYLRNARWYKLILDNLKKS
ERAVVNEFRNTVCHLNAIRNININIKEIKEVENYFALYHYLIQKHLENRFADKKVERDTGDFISKLEEHKTYCKDFVKAYCTPF
GYNLVRYKNLTIDGLFDKNYPGKDDSDEQK (SEQ ID NO: 1)
>33000102661Ga0129314_1001134_19
[animal-digestive system-orangutan individual fecal]
MGKKIHARDLREQRKNDRTTKFAEQNKKREAQMAVQKKDAAVSAKSVSSVSSKKGNVTKSMAKAAGVKSVFAVGKNTVYMTSFG
RGNDAVLEQKIVDTSHEPLNIDDPAYQLNVVTMNGYSVTGHRGETVSAITDNPLRRFNGGKKDKPEQSVPADMLCLKPTLEKKF
FGKEFDDNIHIQLIYNILDIEKILAVYSTNAVYALNNTIADENNENWDLFANFSTDNTYGELINAATYKESTDDVSTDDEKRRE
AEKKKREAKIAEKILADYEKFRKNNRLAYFADAFYIEKNKSKSKSQNKAEGIKRGKKEIYSILALIAKLRHWCVHSEDGRAEFW
LYKLDELEDDFKNVLDVVYNRPVEEINDDFVERNKVNIQILHSKCENSDIAELTRSYYEFLITKKYKNMGFSIKKLREIILEGT
EYNDNKYDTVRNKLYQMVDFILYRGYINENSERAEALVNALRSTLNEDDKTKLYSSEAAFLKRKYMKIIREVTDSLDVKKLKEL
KKNAFTIPDNELRKCFISYADSVSEFTKLIYLLTRFLSGKEINDLVTTLINKFDNIRSFLEIMDELGLERTFTDEYSFFEGSTK
YLAELIELNSFVKSCSFDMSAKRPMYRDALDILGIESDKSEDDIKRMIDNILQVDANGKKLPNKNHGLRNFIASNVVESNRFEY
LVRYGNPKKIRETAKCKPAVRFVLNEIPDAQIERYYKAYYLDEKSLCLANMQRDKLAGVIADIKFDDFSDAGSYQKANATSTKI
TSEAEIKRKNQAIIRLYLTVMYIMLKNLVNVNARYVIAFHCLERDTKLYAESGLEVGNIEKNKTNLTMAVMGVKLENGIIKTEF
DKSLAENAANRYLRNARWYKLILDNLKMSERAVVNEFRNTVCHLNAIRNININIDGIKEVENYFALYHYLIQKHLENRFADNGG
STGDYIGKLEEHKTYCKDFVKAYCTPFGYNLVRYKNLTIDGLFDKNYPGKDDSDKQK (SEQ ID NO: 3)
>33000062261Ga0099364_10024192_5
[arthropoda-digestive system-cubitermes and nasutitermes termite gut]
MSQSTKTKAKRMGVKSVLAHGKDEKGHIKLAITAFGKGNKAELAIQTDEKGSNLAKTYKERNITANKIVSEGIQTSGTIAGEGH
ATFLNNPAEHVGTDYLKLKETLEMEFFGKSFPGDSVRIQIIHQILDIQKLLGIYITDIIYCINNLRDETHLDHESDIVGLSMSN
TNVNLALNQMRPYFGFFGEAFRPVGDDKVKEITLSDEVRKNIEKIIALEEQKRNPSTPRFKQENINLEIENAMGKFKSKDAFET
AKKKYNRIVADETNAKTLRILGAMRQITAHFKDQATLFMSDVELPKILKKEFSKADWQTVEDYYAKLVDRINEGFCKNAATNVH
FLTELLPEESKKQLTEDYFRFAILKEGKNLGVNMKRLREVMFALFVPELTAPETKKRYDSYRAKIYGLTDFLLFKHIHNTKQLE
EWVAVLRETSNEDAKENLYDEFARTAWNTVGDSAKQLIENMQSYFTKKEKEITKTAQPVLSTSSIAHTSKKITQFSSFAKLLAF
LCNFWEGKEINELLSAYIHKFENIQEFINLLEKLEGKKPQFTENYALFNEAAGQRAGEIAQNLRILASIGKMKPDLGDAKRQLY
KAAIEMLGIDTEEYISDEWLEPNMLLAQPPKEPKKDNEKYRKEPHKYSYEKDMETYRKKLREYEETWRSLIDYEYLMPETNPFR
NFVAKQVIESRRFMYLVRYTKPKTVRALMSNRAIVHYVLSRIADIQDHHMTESQIDRYYQNLPQYNEQQHKNVSLETKIDALAD
YLCKYTFEKNVLKQKNGIVLNTKSATKNVEIEHLKALTGLYLTVAYIAVKNLVKANARYYIAFSIFERDYALFEKKLGKDTLEK
YVKPFKYIDKGEEKEGKNNFFALTEYLLDKDNSLRYQWNNDLSDEENKQALRKHLDKKEIRSQRHFSQYWLDIFARQIENAKKT
SESGYLLTAARNCALHLNVLTALPEFVGEFRKTGDKMTSYFELYHFLLQKLMLAEAGLNLDEYRERIDTYQTACKDLINITYVS
LGYNLPRYKNLTCEPLFDEESATGKERQTRLDEKSKEKKQRKGGQK (SEQ ID NO: 4)
>NZ_NFLV01000009_111
[Eubacterium sp. Ann]
MSKKQRPKDIRKRQEEEKREKYKKQEELRKKQEELRKEQEQRREDQKELEKIKKEVGEEGEKKKSRAKALGLKSTFILDRDEQK
VLMTSFGQGNKAVRDKYIIGDKVSDINDDRKNKKAALLVEVCGKSFNISKKENDDCDPVKVNNPVVSRNKKDDDLIHCRKKLEE
LYFGEQFKDNIHIQLIYNILDIEKILAVQVNNIVFALNNLLSWSGEEKFDLIGYLGVNDTYEKFRDAKGKRKGLYEKFSTLIEK
KRMRYFGSTFYPLNEKGEEITSNDKKEWEQFEKKCYHLLAVLGMMRQATAHGDSKRRAEIYKLGKEFDKSEARGCRQEARKELD
DLYRKKIHEMNQSFLKNSKRDILMLFRIYDAESKEAKRKLAQEYYEFIMLKSYKNTGFSIKHLRETVIDKMDEDIKEKIKDDKY
NPIRRKLYRIMDFVIYQYYQESEQQEEAMELVRKLRNAETKVEKELTYRKEAEKLKEELEKIIRNSILSVCDRILAEMNEKRHK
KVNQESSDTDSEEPLDPEISEGITFIKETAHSFSEMIYLLTVFLDGKEINILLTQLIHCFDNISSFMDTMKEENLLTKLKEDYE
IFEESKEISKELRIINSFARMTEPVPKTEKTMFIDAAQILGYSNDEKELEGYVDALLDTKNKTKDKERKGFEKYIWNNVIKSTR
FRYLVRYADPKKVRAFAANKKVVAFVLKDIPDEQIKAYYNSCFSQNSDSSSNMSIAFQDGDSNKKGTSVHDMMRKALTEKITGL
NFGDFEEESKKGIRREESDKNIIRLYLTVLYLVQKNLIYVNSRYFLAFHCAERDEVLYNGETIDNNKEKGSEKDWKKFAKEFII
EHPPKKKVKDYLAKNFEYSNKWSLRVFRNSVQHLNVIRDAYKYIKCIDDNKDVQSYFALYHYLVQRYISEMAENLTDKGELSEG
RLQYYLSQVENYRTYCKDFVKALNVPFAYNLPRYKNLSIDELFDRNNYLPNKAKKWISEKKENGEYVMEDCGNKGAGQVENA
(SEQ ID NO: 5)
>NFIR01000008_78
[Eubacterium sp. An3]
MAKKLRPKELREKRRMAEKEEHKKQEKLRKEQEELRKKQEKQREDQKELEKIKKEEGGEGEKKKSGAKALGLKSTFILDRDEQK
MLMTSFGRGNKAVRDKYIIGDKVSDIDDSWENKKAALSVEVCGKSFNISKKENDDCEPVKVNNPVLSGNKKDDDLIHCRKNLEE
MYFGQQFKDNIHIQLIYNILDIEKILAVQINNIVFILNNLLRWSGEEEFDLIGSLGVNHTYEEFRGRNKNYGKFSELIKQSQMR
YFGSTFCLFNENEERITSENKKEWKRFEKKCYHLLAVLGMMRQATAHGDSKRRAEIYKLGKEFDRLEARGCRPEARKELDELYK
KKIHEMNQGFLKNSKSDILMLFRIYNAESKEAKRKLAQEYYEFIMLKSYKNTGFSIKHLRETMIDKMDEDKKEKLKDDKYNPIR
RKIYRIMDFMIYQYYQEPEHQEEAEELVRKLRNAEIEAKKELAYRKEAEKLKKELEKIIFNSVLPSCDRILSEMDERRNKKVNQ
ESSDTDKEEPLDSEIAEGITFIKETAHSFSEMIYLLTVFLDGKEINILLTQLIHCFDNISSFMDTMEEENLLTKLKEDYEIFEE
SKEISRELRIINSFARMTEPVPKTERIMFIEAAQILGYSNGEKELEGYVDALLDTKNKTNDKKKKGFVRYIWNNVIKSTRFRYL
VRYADPKKVRAFAANKKVVAFVLKDIPDDQIRAYYNSCFRQNSDSSSNNSNASWDADSNKRDISVSDMRKALTEKITGLNFGDF
EEESKKGIRKEESDKNIIRLYLTVLYLVQKNLIYVNSRYFLAFHCAERDEMLYNGETIDNNKEKGSEKDWRKFAKQFIMEHSPK
KKVKDYLAKNFEYSNKWSLKEFRNSVQHLNVIRDAHKYIKYINDNKDVQSYFALYHYLVQRYISERAANRTDKESLSEGRLQYY
LSQVKEYRTYCKDFVKALNVPFAYNLPRYKNLSIDELFDRNNYLPNKAKKWIPEKKENGEYVMEDCGNKDAGQVENA (SEQ
ID NO: 6)
>CDY501033339_14
[gut metagenome]
MEREVKKPPKKSLAKAAGLKSTFVISPQEKELAMTAFGRGNDALLQKRIVDGVVRDVAGEKQQFQVQRQDESRFRLQNSRLADR
TVTADDPLHRAETPRRQPLGAGMDQLRRKAILEQKYFGRTFDDNIHIQLIYNILDIHKMLAVPANHIVHTLNLLGGYGETDFVG
MLPAGLPYDKLRVVKKKNGDTVDIKADIAAYAKRPQLAYLGAAFYDVTPGKSKRDAARGRVKREQDVYTILSLMSLLRQFCAHD
SVRIWGQNTPAALYGLQALPQDMKDLLDDGWRRALGGVNDHFLDTNKVNLLTLFEYYGAETKQERVALTQDFYRFVVLKEQKNM
GFSLRRLREELLKLPDAAYLTGQEYDSVRQKLYMLLDFLLCRLYAQERADRCEELVSALRCALSDEEKDAVYQAEAAALWQALG
DTLRRELLPLLKGKKLQDKDKKKLDELGLSRDVLDGVLFRPAQQGSRANADYFCRLMHLSTWFMDGKEINTLLTTLISKLENID
SLRSVLESMGLAYSFVPAYAMFDHSRYIAGQLRVVNNIARMRKPAIGAKREMYRAAVVLLGVDSPEAAAAITDDLLQIDPETGK
VRPRGDSARDTGLRNFVANNVVESRRFTYLLRYMTPEQARVLAQNEKLIAFVLSTVPSAQLERYCRTCGREDITGRPAQIRYLT
AQIMGVRYESFTDVEQRGRGDNPKKERYKALIGLYLTVLYLAVKNMVNCNARYVIAFYCRDRDTALYQKEVCWYDLEEDKKSGK
QRQVEDYTALTRYFVSQGYLNRHACGYLRSNMNGISNGLLAAYRNAVDHLNVIPPLGSLCRDIGRVDSYFALYHYAVQQYLNGR
YYRKTPREQELFAAMAQHRTWCSDLVKALNTPFGYNLARYKNLSIDGLFDREGDHVVREDGEKPAE (SEQ ID NO: 7)
>CDYU01004315_2
[gut metagenome]
MAKKNKMKPRELREAQKKARQLKAAEIKNNAVPAIAAMPAAEAAAPAVEKKKSSVKAAGMKSILVSENKMYITSFGKGNSAVLE
YEVDKVDNNNYNKTQLSSKDNSNIELGDVNEVNITFSSKRGNESGVEINTSNPTHRSGESSPVRWDMLGLKSELEKRFFGKTFD
DNIHIQLIYNILDIEKILAVYVTNIVYALNNMLGIKGSESYDDFMGYLSARNTYEVFTHPDKSNLSDKVKGNIKKSLSKFNDLL
KTKRLGYFGLEEPKTKDTRVSQAYKKRVYHMLAIVGQIRQCVFHDKSGAKRFDLYSFINNIDPEYRDTLDYLVEERLKSINKDF
IEGNKVNISLLIDMMKGYEADDIIRLYYDFIVLKSQKNLGFSIKKLREKMLEEYGYRFKDKQYDSVRSKMYKLMDFLLFCNYYR
NDVVAGEALVRKLRFSMTDDEKEGIYADEASKLWGKFRNDFENIADHMNGDVIKELGKADMDFDEKILDSEKKNASDLLYFSKM
IYMLTYFLDGKEINDLLTTLISKFDNIKEFLKIMKSSAVDVECELTAGYKLFNDSQRITNELFIVKNIASMRKPAASAKLTMFR
DALTILGIDDKITDDRISEILKLKEKGKGIHGLRNFITNNVIESSRFVYLIKYANAQKIREVAKNEKVVMFVLGGIPDTQIERY
YKSCVEFPDMNSSLEAKRSELARMIKNIRFDDFKNVKQQAKGRENVAKERAKAVIGLYLTVMYLLVKNLVNVNARYVIAIHCLE
RDFGLYKEIIPELASKNLKNDYRILSQTLCELCDDRDESPNLFLKKNKRLRKCVEVDINNADSSMTRKYRNCIAHLTVVRELKE
YIGDIRTVDSYFSIYHYVMQRCITKREDDTKQEEKIKYEDDLLKNHGYTKDFVKALNSPFGYNIPRFKNLSIEQLFDRNEYLTE
K (SEQ ID NO: 8)
>CDYX01024884_4
[gut metagenome]
MAKKNKMKPRELREAQKKARQLKAAEINNNAVPAIAAMPAAEVIAPAAEKKKSSVKAAGMKSILVSENKMYITSFGKGNSAVLE
YEVDKVDDNDYNKTQLSSKDNSNIELGNVNEVNITFSSRRGFESGVEINTSNPTHRSGESSSVRGDMLGLKSELEKRFFGKTFD
DNIHIQLIYNILDIEKILAVYVTNIVYALNNMLGVKGSESYDDFMGYLSAQNTYYIFTHPDKSNLSDKVKGNIKKSLSKFNDLL
KTKRLGYFGLEEPKTKDKRVSEAYKKRVYHMLAIVGQIRQSVFHDKSNELDEYLYSFIDIIDSEYRDTLDYLVDERFDSINKGF
IQGNKVNISLLIDMMKDDYEADDIIRLYYDFIVLKSQKNLGFSIKKLREKMLEEYGFRFKDKQYDSVRSKMYKIMDFLLFCNYY
RNDVVAGEALVRKLRFSMTDDEKEGIYADEAAKLWGKFRNDFENIADHMNGDVIKELGKADMDFDEKILDSEKKNASDLLYFSK
MIYMLTYFLDGKEINDLLTTLISKFDNIKEFLKIMKSSAVDVECELTAGYKLFNDSQRITNELFIVKNIASMRKPAASAKLTMF
RDALTILGIDDNITDDRISEILKLKEKGKGIHGLRNFITNNVIESSRFVYLIKYANAQKIREVAKNEKVVMFVLGGIPDTQIER
YYKSCVEFPDMNSSLEVKRSELARMIKNICFDDFKNVKQQAKGRENVAKERAKAVIGLYLTVMYLLVKNLVNVNARYVIAIHCL
ERDFGLYKEIVSELASKNLKNDYRILSQTLCELCDKSPNLFLKKNERLRKCVEVDINNADSSMTRKYRNCIAHLTVVRELKEYI
GDIRAVDSYFSIYHYVMQRCITKRGNDTKQEDKIKYEDDLLKNHGYTKDFVKALNSPFGYNIPRFKNLSIEQLFDRNEYLTEK
(SEQ ID NO: 9)
>CDTW01032418_55
[gut metagenome]
MEREVKKPPKKSLAKAAGLKSTFVISPQEKELAMTAFGRGNDALLQKRIVDGVVRDVAGEKQQFQVQRQDESRFRLQNSRLADR
TVTADDPLHRAETPRRQPLGAGMDQLRRKAILEQKYFGRTFDDNIHIQLIYNILDIHKMLAVPANHIVHTLNLLGGYGETDFVG
MLPAGLPYDKLRVVKKKNGDTVDIKADIAAYAKRPQLAYLGAAFYDVTPGKSKRDAARGRVKREQDVYAILSLMSLLRQFCAHD
SVRIWGQNTTAALYHLQALPQDMKDLLDDGWRRALGGVNDHFLDTNKVNLLTLFEYYGAETKQARVALTQDFYRFVVLKEQKNM
GFSLRRLREELLKLPDAAYLTGQEYDSVRQKLYMLLDFLLCRLYAQERADRCEELVSALRCALSDEEKDTVYQAEAAALWQALG
DTLRRKLLPLLKGKKLQDKDKKKSDELGLSRDVLDGVLFRPAQQGSRANADYFCRLMHLSTWFMDGKEINTLLTTLISKLENID
SLRSVLESMGLAYSFVPAYAMFDHSRYIAGQLRVVNNIARMRKPAIGAKREMYRAAVVLLGVDSPEAAAAITDDLLQIDPETGK
VRPRSDSARDTGLRNFIANNVVESRRFTYLLRYMTPEQARVLAQNEKLIAFVLSTVPDTQLERYCRTCGREDITGRPAQIRYLT
AQIMGVRYESFTDVEQRGRGDNPKKERYKALIGLYLTVLYLAVKNMVNCNARYVIAFYCRDRDTALYQKEVCWYDLEEDKKSGK
QRQVEDYTALTRYFVSQGYLNRHACGYLRSNMNGISNSLLTAYRNAVDHLNAIPPLGSLCRDIGRVDSYFALYHYAVQQYLNGR
YYRKTPREQELFAAMAQHRTWCSDLVKALNTPFGYNLARYKNLSIDGLFDREGDHVVREDGEKPAE (SEQ ID NO: 10)
>CDZT01047721_3
[gut metagenome]
MAKKNKMKPRELREAQKKARQLKAAEINNNAAPAIAAMPAAQVIAPAAEKKKSSVKAAGMKSILVSENKMYITSFGKGNSAVLE
YEVDKVDNNNYNKTQLSSKDNSNIELGDVNEVNITFSSKHGFESGVEINTSNPTHRSGESSPVRWDMLGLKSELEKRFFGKTFD
DNIHIQLIYNILDIEKILAVYVTNIVYALNNMLGIKGSESYDDFMGYLSARNTYEVFTHPDKSNLSDKVKGNIKKSFSTFNDLL
KTKRLGYFGLEEPKTKDTRVSEAYKKRVYHMLAIVGQIRQCVFHDLSEHSEYDLYSFIDNSKKVYRECRETLNYLVDERFDSIN
KGFIQGNKVNISLLIDMMKDDYEADDIIHLYYDFIVLKSQKNLGFSIKKLREKMLDEYGFRFKDKQYDSVRSKMYKLMDFLLFC
NYYRNDVVAGEALVRKLRFSMTDDEKEGIYADEAEKLWGKFRNDFENIADHMNGDVIKELGKADMDFDEKILDSEKKNASDLLY
FSKMIYMLTYFLDGKEINDLLTTLISKFDNIKEFLKIMKSSAVDVECELTAGYKLFNDSQRITNELFIVKNIASMRKPAASAKL
TMFRDALTILGIDDKITDDRISEILKLKEKGKGIHGLRNFITNNVIESSRFVYLIKYANAQKIREVAKNEKVVMFVLGGIPDTQ
IERYYKSCVEFPDMNSSLKVKRSELARMIKNIRFDDFKNVKQQAKGRENVAKERAKAVIGLYLTVMYLLVKNLVNVNARYVIAI
HCLERDFGLYKEIIPELASKNLKNDYRILSQTLCELCDDRDESPNLFLKKNRRLRKCVEVDINNADSSMTRKYRNCIAHLTVVR
ELKEYIGDIRTVDSYFSIYHYVMQRCITKREDDTKQEEKIKYEDDLLKNHGYTKDFVKALNSPFGYNIPRFKNLSIEQLFDRNE
YLTEK (SEQ ID NO: 11)
>ODXP01000624_4
[human metagenome]
MAKKNKMKPRELREAQKKARQLKAAEINNNAAPAIAAMPAAEVIAPAAEKKKSSVKAAGMKSILVSENKMYITSFGKGNSAVLE
YEVDNNDYNKTQLSSKDSSNIELRGVNEVNITFSSKHGFGSGVEINTSNPTHRSGESSPVRWDMLGLKSELEKRFFGKTFDDNI
HIQLIYNILDIEKILAVYVTNIVYALNNMLGIKKSESHDDFMGYLSAKNTYDVFTNPNGSTLSDDKKKNIRKSLRKFNDLLKTK
RLGYFGLEEPKTKDTRVSQAYKKRVYHMLAIVGQIRQSVFHDKSSKLHEDLYSFIDIIDSEYRETLDYLVDERFDSINKGFIQG
NKVNISLLIDMMKGYEADDIIRLYYDFIVLKSQKNLGFSIKKLREKMLDEYGFRFKDKQYDSVRSKMYKLMDFLLFCNYYRNDV
AAGEALVRKLRFSMTDDEKEGIYADEAAKLWGKFRNDFENIADHMNGDVIKELGKADMDFDEKIIDSEKKNASDLLYFSKMIYM
LTYFLDGKEINDLLTTLISKFDNIKEFLKIMKSSAVDVECELTAGYKLFNDSQRITNELFIVKNIASMRKPAASAKLTMFRDAL
TILGIDDNITDDRISEILKLKEKGKGIHGLRNFITNNVIESSRFVYLIKYANAQKIRKVAKNEKVVMFVLGGIPDTQIERYYKS
CVEFPDMNSSLEVKRSELARMIKNISFDDFKNVKQQAKGRENVAKERAKAVIGLYLTVMYLLVKNLVNVNARYVIAIHCLERDF
GLYKEIIPELASKNLKNDYRILSQTLCELCDKSPNLFLKKNRRLRKCVEVDINNADSSMTRKYRNCIAHLTVVRELKEYIGDIR
TVDSYFSIYHYVMQRCITKRENDTKQEEKIKYEDDLLKNHGYTKDFVKALNSPFGYNIPRFKNLSIEQLFDRNEYLTEK (SEQ
ID NO: 12)
>ODKA01005851_3
[human metagenome]
MAKKNKMKPRELREAQKKARQLKAAEINNNAAPAIAAMPAAEVIAPAAEKKKSSVKAAGMKSILVSENKMYITSFGKGNSAVLE
YEVDNNDYNKTQLSSEDSSNIELCGVNKVNITFSSKHGFESGVEINTSNPTHRSGESSPVRWDMLGLKSELEKRFFGKTFDDNI
HIQLIYNILDIEKILAVYVTNIVYALNNMLGEGDESNYDFMGYLSTFNTYKVFTNPNGSTLSDDKKENIRKSLSKFNALLKTKR
LGYFGLEEPKTKDTNALEAYKKRVYYMLAIVGQIRQCVFHDLSEHSEYDLYSFIDNSKKVYRECRETLDYLVDERFDSINKGFI
QGNKVNISLLIDMMKGYEADDIIRLYYDFIVLKSQKNLGFSIKKLREKMLDEYGFRFKDKQYDPVRSKMYKLMDFLLFCNYYRN
DVVAGEALVRKLRFSMTDDEKEGIYADEAAKLWGKFRNDFENIADHMNGDVIKELGKADMDFDEKILDSEKKNASDLLYFSKMI
YMLTYFLDGKEINDLLTTLISKFDNIKEFLKIMKSSAVNVECELTAGYKLFNDSQRITNELFIVKNIASMRKPAASAKLTMFRD
ALTILGIDDKITDDRISEILKLKEKGKGIHGLRNFITNNVIESSRFVYLIKYANAQKIREVAKNEKVVMFVLGGIPDTQIERYY
KSCVEFPDMNSSLEAKRSELARMIKNISFDDFKNVKQQAKGRENVAKERAKAVIGLYLTVMYLLVENLVNVNARYVIAIHCLER
DFGLYKEIISELASKNLKNDYRILSQTLCELCDNCDESPNLFLKKNERLRKCVEVDINNADSNMTRKYRNCIAHLTVVRELNKY
IKDIRTVDSYFSIYHYVMQRCITKREDDKKQEEKIKYEDDLLKNHGYTKDFVKALNSPFGYNIPRFKNLSIEQLFDRNEYLTEK
(SEQ ID NO: 13)
>OGPQ01001037_3
[human gut metagenome]
MAKKNKMKPRELREAQKKARQLKAAEINNNAAPAIAAMPAAEAAAPAAEKKKSSVKAAGMKSILVSENKMYITSFGKGNSAVLE
YEVDNNDYNKTQLSSKDNSNIELGDVDEVNITFSSKHGFGSGVEINTSNPTHRSGESSPVRWDMLGLKSELEKRFFGKTFDDNI
HIQLIYNILDIEKILAVYVTNIVYALNNMLGEGGDESHDDIMGYLSAKNTYDVFTDPDESDLSKNIKGNIKKSLSKFNDLLKTK
RLGYFGLEEPKTKDKRASEAYKKRVYHMLAIVGQIRQSVFHDKSNELDEYLYSFIDIIDSEYRDTLDYLVDERFDSINKGFIQG
NKVNISLLIDMMKGYEADDIIRLYYDFIVLKSQKNLGFSIKKLREKMLDEYGFRFKDKQYDSVRSKMYKLMDFLLFCNYYRNDV
IAGEALVRKLRFSMTDDEKEGIYADEAAKLWGKFRNDFENIADHMNGDVIKELGKADMDFDEKILDSEKKNASDLLYFSKMIYM
LTYFLDGKEINDLLTTLISKFDNIKEFLKIMKSSAVDVECELTAGYKLFNDSQRITNELFIVKNIASMRKPAASAKLTMFRDAL
TILGIDDNITDDRISEILKLKEKGKGIHGLRNFITNNVIESSRFVYLIKYANAQKIREVAKNEKVVMFVLGGIPDTQIERYYKS
CVEFPDMNSSMGAKRRELAKMIKSISFEDFKDVKQQAKGRENVAKERAKAVIGLYLTVMYLLVKNLVNVNARYVIAIHCLERDF
GLYKEIIPELASKNLKNDYRILSQTLCELCDNGDESPNLFLKKNKRLRKCVEVDINNADSNMTRKYRNCIAHLTVVRELNKYIK
DIRTVDSYFSIYHYVMQRCITKRENDTKQEEKINYEDDLLKNHGYTKDFVKALNSPFGYNIPRFKNLSIEQLFDRNEYLTEK
(SEQ ID NO: 14)
>CDZK01015063_14
[gut metagenome]
MFMAKKNKMKPRERREAQKKARQLKAAEINNNAVPAIAAMHAAEVIAPAAEKKKSSVKAAGMKSILVSENKMYITSFGKGNSAV
LEYEVDNNDYNQTQLSSKDNSNIELCGVTKVNITFSSKHGFESGVEINTSNPTHRSGESSPVRGDMLGLKSELEKRFFGKTFDD
NIHIQLIYNILDIEKILAVYVTNIVYALNNMLGEGDESNYDFMGYLSTFNTYKVFTNPNGSTLSDDKKENIRKSLSKFNALLKT
KRLGYFGLEEPKTKDTRASEAYKKRVYHMLAIVGQIRQCVFHDKSGAKRFDLYSFINNIYPEYRDTLDYLVEERLKSINKDFIQ
GNKVNISLLIDMMKGYEADDIIRLYYDFIVLKSQKNLGFSIKKLREKMLDEYGFRFKDKQYDSVRSKMYKLMDFLLFCNYYRND
VVAGEALVRKLRFSMTDDEKEGIYADEAAKLWGKFRNDFENIADHMNGDVIKELGKADMDFDEKILDSEKKNASDLLYFSKMIY
MLTYFLDGKEINDLLTTLISKFDNIKEFLKIMKSSAVDVECELTAGYKLFNDSQRITNELFIVKNIASMRKPAASAKLTMFRDA
LTILGIDDKITDDRISEILKLKEKGKGIHGLRNFITNNVIESSRFVYLIKYANAQKIREVAKNEKVVMFVLGGIPDTQIERYYK
SCVEFPDMNSSLEAKRSELARMIKNISFDDFKNVKQQAKGRENVAKERAKAVIGLYLTVMYLLVKNLVNVNARYVIAIHCLERD
FGLYKEIIPELASKNLKNDYRILSQTLCELCDDRDESPNLFLKKNKRLRKCVEVDINNADSSMTRKYRNCIAHLTVVRELKKYI
GDIRTVDSYFSIYHYVMQRCITKREDDTKQEEKIKYEDDLLKNHGYTKDFVKALNSPFGYNIPRFKNLSIEQLFDRNEYLTEK
(SEQ ID NO: 15)
>33000015981EMG_10000232_1
[mammals-digestive system-asian elephant fecal-elephas maximus]
MYNIDKLWLTHILFVSLTAGKKNETILEQEINKDSNKKNILVNPTKFDANIKEVRMVSIKPEKYNETVVNNPYYVKDGQVVGQD
YLGIKDKLEDTFFGKTYDDNIHIQIAYKLLDIRKIMGMSVGSAVFSLNNLQQRPVGENPNDIVGQIKTDTSFDEIPDNYAKADK
DFIDILLDYTRYFDNVFEKQSISVDDKTKDILNNLKECETVSVKTVGTIDRINKNDPNNNNYTIFKIGGLKIKLKGILSNVDVG
TKLNIEGQIRRNNDYRDKKGKLCRSYSLLTGAKYSISHEVYNPDTYTFNYDILRLVSYLRQAVVHNNNDDYIDWLYSIDNKKET
KDILNAANKVFESQLEAFNKDFNANAQKNVYMIASVLNDSPKTMFKEEIKDIYEKYYNFVLFKENRNVGINLRNIRNNIFYEDI
KPNYDEKELSRERAKINTLLDYFIYQDFNNNEKLAEDVIARLQPTKQEVDKVQVYADVTKEFKVRNPKLVDRILSTVKNTIEAK
IENFIPDNCVPSSSIKVSSLAKYVYVLAKFLDTKEVNNLLTSLINSFENIGSLVKVLKDEKGYSIYKDRFALLNQKNPFDLAND
FILVKNLATMKTKLAKANVKDVKNKVGKRLYCSAINLFKDKNDEVILDNQEFEDIMSEFSSNVGNKKNRRGTAGSKIRNFLINN
VIDSRRFYFIIKYYDTRRCHEIIQNENLVRFILGREDMPTDQLIRYYKTITGNECNNRNQIIDTLVKKLKEVSFRKLLLKGERL
KEIGNDQDNQEVESLKSLIGLYLTICYLIVKGIVNVNSVYLLAWSAYERDMYYLYNEDMEDKNTNHDYLKAATDFYNNKSCYQK
RHKYLIKDIEEARQNSNNLNYKDYRNKVCHYNICTSFMDYANNIGKVSCYFDIYNYCFQRYFAKKNDNLSTLLDTYNCYNKDYL
KLLNMPFAYNMARYKNLTIADLFNDKYPSENKEATASND (SEQ ID NO: 16)
>33000015981EMG_10003641_1
[mammals-digestive system-asian elephant fecal-elephas maximus]
MEETKVTKETTIEKQSTKRHKQKSKKTATKMSGLKSALVINNHEMLLTSFGKGNNAIAEKRYILDGDIETINNKNKKFDANNDS
KVVVIKGISNPNGQLTNPLFDQSPTAIQPNRTSGNDMIGIRRMLERKYFVHNEENKEFQDNIRIQIAYCILDIEKILMPHINNI
CFEINNMLRLEGYQEDSFMGSFNLYKPYDAFIATTDDKESSRRDNFAKLMTSKQVRYLGNALYSDSLSNLTKDEILDGKRSKEL
KKYYQELCLLGMVRQSMIHSNQFNSSIYTLDSSYDSTMNTAELLGKGDDSSLVALATDARVEARAILDEIYKKGVDSINNSFLS
NSINDLENLFKIYKCDSSEKKTELIKQYYDFCIRKPQMNMGFSITTIREGMFTRCSEANTLLLCDEGSTVKLNVHDTMKSKFYK
NLDFMIYKYYKYENPEKGEKLIEDLRSKIKGKKKEDEDKKQRYAEESACILKAKRDIIKKDLTEAANKDLFADLVKSNKNEKQK
FKNEYEELLKPFMIPVKVDYFSELIYLVTRFLSGKEINDLLTQLINKFENIAAFIRMYQNDQGKLEFTANYKMFEIDPQKDIPK
DGKRVLSGSAKIAYYLRTINYIARMESFEIKSDKTAINDAISLLGYNSNEHRDEFITYTMAKHVVDKYQNTDYQKIVKDFLSAN
KTLDCKSKNMQAFVSELKNAHLSENYEQREKEIYELADTNLPAYFSEEDKEKLARYIVHSDGTYKKFLKESFYAIEELPNEGFR
NFISNNVINSRRFNYIMRFCNPEKIANIGKNKVLISFALSSLAEKTDMIAKYYRVFCDRIDDQKTMEDYLVNKLTKISYTEFLN
VNQKANAEKNKEKDRSQKLIGLYITLLYEIVKNLVNINSRYNIAFQRCDNDSIMILQGQYDERAVQESKLTKKFISNQKLNSYS
CRYLTHNISQLDRCNDFIRQYRNKVAHLEVVSNIDEYLSGIKHIESYYALYHYLMQKCLLKNYRIEDHSQNEYKNLNDFSSKLD
KHGTYVKDFVKALNVPFGYNLPRYKNLSIDELFDRNKLKTGGTIEMKGE (SEQ ID NO: 17)
>33000184751Ga0187907_10006632_17
[mammals-digestive system-feces]
MKERIDMIEKKKSYAKGMGLKSTLVSDSKVYMTSFGNGNDARLEKVVENNAISCLVDKKEAFVAEITDKNAGYKIINKKFGHPK
GYDVVANNPLYTGPVQQDMLGLKETLEKRYFGSSVSGNDNICIQVIHNILDIEKILAEYITNAAYAVNNIAGLDKDIIGFGKFS
TVYTFDEFAEPDRHKERFIKDGKLDTKLINQLKNQYDEFDAFLDDTRFGYFGKAFFCKEGDKYLNKQDNERYHILALLSGLRNW
VVHNNEVESKIDRKWLYNLDKNLDKEYITTLDYMYSDIADELTKSFSKNSAANVNYIAEILNIDSKTFAEQYFRFSIMKEQKNL
GFTLTKLRECMLDREELSDIRDNHKVFDSIRSKLYTMMDFVIYRYYIEEAKKIENENKTLSDDKKKLSEKDIFIISLRGSFSEE
QKDKLYSDEAERLWAKLGKLMLEIKKFRGQMTRDYKKSDTPTLNRILPESEDVSTFSKLMYALTMFLDGKEINELLTTLINKFD
NIQSMLKIMPLIGVNAKFSSDYAFFNNSEKIADELKLIKSFARMGEPVANAKRDMMIDAIKILGTDLDDNEIKKLADSFFKDSN
GKLLHKGKHGMRNFIINNVVNNKRFHYIIRYGDPAHLHEIAKNEVVVRFVLGRIADIQKKQGKGGKNQIDRYYEICIGNGYGKS
VSEKIDALTKVIINMNYDQFEAKRKVIENTGRDNAEREKYKKIISLYLTVIYQILKNLVNVNSRYVIGFHCVERDAQLYKEKGY
DINTNNLESKGFTSVTKLCVGIADDDPVKYKNVEIELKERALASFDALEKENPELYEKYNMYSEKQKEAELEKQINREKAKTAL
NAHLRNTKWNVIIRENIRNTEKDACKQFRNKADHLEVARYAYKYINDISEVNSYFQLYHYIMQRIIIDSSGNNANGMIKKYYES
VISDKKYNDRLLKLLCVPFGYCIPRFKNLSIEALFDKNEAAKYDKIKKKVAVR (SEQ ID NO: 18)
>33000184751Ga0187907_10006632_17
[mammals-digestive system-feces]
MIEKKKSYAKGMGLKSTLVSDSKVYMTSFGNGNDARLEKVVENNAISCLVDKKEAFVAEITDKNAGYKIINKKFGHPKGYDVVA
NNPLYTGPVQQDMLGLKETLEKRYFGSSVSGNDNICIQVIHNILDIEKILAEYITNAAYAVNNIAGLDKDIIGFGKFSTVYTFD
EFAEPDRHKERFIKDGKLDTKLINQLKNQYDEFDAFLDDTRFGYFGKAFFCKEGDKYLNKQDNERYHILALLSGLRNWVVHNNE
VESKIDRKWLYNLDKNLDKEYITTLDYMYSDIADELTKSFSKNSAANVNYIAEILNIDSKTFAEQYFRFSIMKEQKNLGFTLTK
LRECMLDREELSDIRDNHKVFDSIRSKLYTMMDFVIYRYYIEEAKKIENENKTLSDDKKKLSEKDIFIISLRGSFSEEQKDKLY
SDEAERLWAKLGKLMLEIKKFRGQMTRDYKKSDTPTLNRILPESEDVSTFSKLMYALTMFLDGKEINELLTTLINKFDNIQSML
KIMPLIGVNAKFSSDYAFFNNSEKIADELKLIKSFARMGEPVANAKRDMMIDAIKILGTDLDDNEIKKLADSFFKDSNGKLLHK
GKHGMRNFIINNVVNNKRFHYIIRYGDPAHLHEIAKNEVVVRFVLGRIADIQKKQGKGGKNQIDRYYEICIGNGYGKSVSEKID
ALTKVIINMNYDQFEAKRKVIENTGRDNAEREKYKKIISLYLTVIYQILKNLVNVNSRYVIGFHCVERDAQLYKEKGYDINTNN
LESKGFTSVTKLCVGIADDDPVKYKNVEIELKERALASFDALEKENPELYEKYNMYSEKQKEAELEKQINREKAKTALNAHLRN
TKWNVIIRENIRNTEKDACKQFRNKADHLEVARYAYKYINDISEVNSYFQLYHYIMQRIIIDSSGNNANGMIKKYYESVISDKK
YNDRLLKLLCVPFGYCIPRFKNLSIEALFDKNEAAKYDKIKKKVAVR (SEQ ID NO: 19)
>33000184941Ga0187911_10069260_3
[mammals-digestive system-feces]
MSTKKRFRYSVAAKAAGLKSSLAVDTDRTVMTSFGHGNAAILEKEIVDGEISVLNIENPAFDAVINDKKYALTGHHAGVHALVD
QPQNRSDAVHIRGALEKKYFGDTFADNIHVQIAYNILDITKILTVYANNVVYALNNLVHADDDTQADELDSLGNFSAGTSYAKS
KSKSKSKQQDFVELFIKKKEIHGYFGDTFAFLDKRIADADKEKQVYAMLACLGSLRQACSHYRIRYSVNGKNVDADADTWLFSS
AQLDQTDPLFSEMLNRIYSHKIKTVNQNFFENNRKANFPILKKMYPETTLKVLMNEYYDFSIRKGYKNFGFSIKSLREALLSPQ
YESLIGVQIKDNKEYDTVRSKLYQLFDFALTRYFNQHPDMVDAFVVELRSLAKDEDAKNAVYEKYAKAVWNDVKQPIAVMLSYM
NGSAIKNIKAFELKPDQKELNGIMNSNALDVPHFCKLVYFLTRFLDGKEINDLLTTLVNKFDNIHSFNQVLTALGLSASYEADY
KIFEDSGRVVEYLREINSFARMTVDMEKIKRSAYKKALLILGSSKYSDEDLDARVDEMLGVDYNQNGEKIKVRVDTGFRNFIAN
NVVESSRFHYLIRYCHPRKIRNLAGNAALIEYQLRRLPELQILRYYEACTEPIKRTARTMDEKIGTLIDLIVKMDFSQFEDVQQ
NDRVRVFSDAEKKEKIRKMREKQRYQSIISLYLTMLYLIVKNLVNINARYVMAFQAWERDNYLLLQLSGKEAEAEYLNLTRHFI
EPLDGAKPYLKKRPVEYLKKDMAMVGNSSIRHFRNATVHLNVIMEAHRYTKDIKYIGSYYALYHYILQRHLLDKIEEDSYAEKT
VSEKLWESQISQYGTYSKDFVKALCCPFGYNLPRFKNLSIEQLFDRNESKEITDATAPRQ (SEQ ID NO: 20)
>33000184931Ga0187909_10030832_9
[mammals-digestive system-feces]
MAKKKKAKQRREEQEAARMNKIQSAVKAKAETAPAVSSAFVEKRKDKQSKKTFAKASGLKSTLAVDNSAVMTVFGRGNEAKLDH
RINADLQSESLHPQAALKNVHAPNKQKIHFIGRMQDMNLTADHPLHSHDGERAVGADLLCAKDKLEQLYFGRTFNDNIHIQLIY
QILDIQKILALHANNIIFALDNLLHKKNDELSDDFVGMGRMRATIGYDAFRNSTNQKVQETYREFQEFVRRKELLYFGSAFYNG
DTRRDEKVIYHILSLAASVRQFCFHNDYTSDDGKGFIKADWMYRLEEALPAEYKDTLDALYLEGVEGLDQSFLKNNTVNIQILC
SIFNHDDPNKIAEEYYGFLMTKEYKNMGFSIKKLRECMLELPELSGYKEDQYNSVRSKLYKLFDFIIAHYFRKHPEKGEEMVDC
LRLCMTEDEKDSHYEGTAKKLVRELAYDMQEAAEQANGSNITQMQKNEQQGKTKGMFAIRDEIRVSRKPVSYFSKVIYVMTLLL
DGKEINDLLTTLINKFENIVSFEDVLRQLNVDCTFKPEFAFFGYDRCRNISGELRLINSFARMQKPSAKAKHVMYRDALRILGL
DNGMSEEALDQEVRRILQIGADGKPIKNANKGFRNFIASNVIESSRFRYLVRYNNPHKTRMIAQNEAIVRFVLSEIPDEQIRRY
YDVCRDPKLPRSSSREAQVDILTGIITDVNYRIFEDVPQSKKINKDRPDANDRMTLKKQRYQAIVSLYLTVMYLVTKNLVYVNS
RYVMAFHALERDAYLYGITNIKGDYRKLTDNLLADENYKKFGHFKNKKWRGIAEQNLRNSDVPVIKSFRNMAAHISVIRNIDLY
IGDIQKVDSYFALYHFLMQKLIQRVVPENTKGLSDQTKKYYDALEQYNTYCKDFVKAYCTPFAYVTPRYKNLTIDGLFDRNRPG
EDK (SEQ ID NO: 21)
>33000184931Ga0187909_10024847_5
[mammals-digestive system-feces]
MGVEKNKVFESVIMNFDQERKYGFIEYKETNNLFFHMENVKNPKEIVKGAKVRFEIYENPKPKKQNQRFSAINVEVITDETHKE
AKIQKNEFKTFDQFTKELQETQKVNGETKKEHITKNKHTNVKAAGVKSVFAVDDGNVLITSFGRGNAADIETLKSDDDKTINLT
ETENQKKYVVTNKRSNVKGLADNPTKVESIIPGETQIGFKSILEKHFFGRTFNDNIHIQIIHNILDIKKILAVHTNNIVYALDN
IHERGRENSAEKPIDMIGAGGISTSKEYEQYCSEKSDYEDNFLKQLINNERIAYFGNAFFKDEGNKKVMRTEKEIYYILGMLNE
VRNVSTHFTEEDNRDWAKANLYNLSNRLKVGSKEVLNQLYKEKIDKIDANGFVNKGCKRDFSILFKSLNLTTDKDKGELVVGFY
DFSIRKNYKNIGFSIKTLREYMLKISNSTLCADTISNNAIRPKAYKLYDFIIWHYYMNKPDKINDFVEKLRTQNKNDEKIKLYY
DEAVCLLSELGREIHTMTSCVHNIENTSYEITDKKQKEYYKMQINSLNSADKVSDFSKVIYLVTLFLDGKEINDLLTTLINKFD
NIASLLSVLEKQSGKKVEFVENYSFFNSSNLLKEKTLNKSENYTCKIVEELREINSFARMTGDCKIRKSAFEDASQLLGYHDKT
VNNLFEVLRLKELESKDWKKRTDDEQQEYDRLLNKHHYFKSGKKLPDTGLRNFIINNVIESRRFNYIVRYADPKKIRKCTENNE
LLKFAFKDVPDSQVDRYYNICVTNKITNATREEKIERLVDIIKSMNLSKVATVKQRDKQDNVEKQKQLAIMSLYLNILYQIAKN
LVYVNSRYVMAFHSLERDSQMLFDAYYDVKRGYCDLSTVLLFGVDDLQNRNRGSYKYLRDNRRSNKDVIETFGDFKGKVSKVVE
KKNQGLTNEIYDSLCNVAGTTKTEVQNEIKSILKSNGLDESASSYLSHKLVNKVHSYKYLKQNLDCADNTMINQFRNNVAHLNT
IRNMDGIENVTGITSYFQIYHYLMQKALYKEFKKCRENAVRKWIPYITENAEPKYVYWNKKEQQEVEVSFNPKIFGYMENIKNH
SNTYCKDFVKALCAPFAYNLPRFKNLSIEELFDMHELSEEPKESMKLTD (SEQ ID NO: 22)
>WP_074833651.1
[Ruminococcus albus]
MAKKSKGMSLREKRELEKQKRIQKAAVNSVNDTPEKTEEANVVSVNVRTSAENKHSKKSAAKALGLKSGLVIGDELYLTSFGRG
NEAKLEKKISGDTVEKLGIGAFEVAERDESTLTLESGRIKDKTARPKDPRHITVDTQGKFKEDMLGIRSVLEKKIFGKTFDDNI
HVQLAYNILDVEKIMAQYVSDIVYMLHNTDKTERNDNLMGYMSIRNTYKTFCDTSNLPDDTKQKVENQKREFDKIIKSGRLGYF
GEAFMVNSGNSTKLRPEKEIYHIFALMASLRQSYFHGYVKDTDYQGTTWAYTLEDKLKGPSHEFRETIDKIFDEGFSKISKDFG
KMNKVNLQILEQMIGELYGSIERQNLTCDYYDFIQLKKHKYLGFSIKRLRETMLETTPAECYKAECYNSERQKLYKLIDFLIYD
LYYNRKPARIEEIVDKLRESVNDEEKESIYSVEAKYVYESLSKVLDKSLKNSVSGETIKDLQKRYDDETANRIWDISQHSISGN
VNCFCKLIYIMTLMLDGKEINDLLTTLVNKFDNIASFIDVMDELGLEHSFTDNYKMFADSKAICLDLQFINSFARMSKIDDEKS
KRQLFRDALVILDIGNKDETWINNYLDSDIFKLDKEGNKLKGARHDFRNFIANNVIKSSRFKYLVKYSSADGMIKLKTNEKLIG
FVLDKLPETQIDRYYESCGLDNAVVDKKVRIEKLSGLIRDMKFDDFSGVKTSNKAGDNDKQDKAKYQAIISLYLMVLYQIVKNM
IYVNSRYVIAFHCLERDFGMYGKDFGKYYQGCRKLTDHFIEEKYMKEGKLGCNKKVGRYLKNNISCCTDGLINTYRNQVDHFAV
VRKIGNYAAYIKSIGSWFELYHYVIQRIVFDEYRFALNNTESNYKNSIIKHHTYCKDMVKALNTPFGYDLPRYKNLSIGDLFDR
NNYLNKTKESIDANSSIDSQ (SEQ ID NO: 23)
>WP_041337480.1
[Ruminococcus bicirculans]
MAKKNKMKPRELREAQKKARQLKAAEINNNAVPAIAAMPAAEAAAPAAEKKKSSVKAAGMKSILVSENKMYITSFGKGNSAVLE
YEVDNNDYNKTQLSSKDNSNIELCDVGKVNITFSSRRGFESGVEINTSNPTHRSGESSSVRGDMLGLKSELEKRFFGKNFDDNI
HIQLIYNILDIEKILAVYVTNIVYALNNMLGEGDESNYDFMGYLSTFNTYKVFTNPNGSTLSDDKKENIRKSLSKFNALLKTKR
LGYFGLEEPKTKDTRASEAYKKRVYHMLAIVGQIRQCVFHDKSGAKRFDLYSFINNIDPEYRETLDYLVDERFDSINKGFIQGN
KVNISLLIDMMKGYEADDIIRLYYDFIVLKSQKNLGFSIKKLREKMLDEYGFRFKDKQYDSVRSKMYKLMDFLLFCNYYRNDIA
AGESLVRKLRFSMTDDEKEGIYADEAAKLWGKFRNDFENIADHMNGDVIKELGKADMDFDEKILDSEKKNASDLLYFSKMIYML
TYFLDGKEINDLLTTLISKFDNIKEFLKIMKSSAVDVECELTAGYKLFNDSQRITNELFIVKNIASMRKPAASAKLTMFRDALT
ILGIDDKITDDRISEILKLKEKGKGIHGLRNFITNNVIESSRFVYLIKYANAQKIREVAKNEKVVMFVLGGIPDTQIERYYKSC
VEFPDMNSSLGVKRSELARMIKNISFDDFKNVKQQAKGRENVAKERAKAVIGLYLTVMYLLVKNLVNVNARYVIAIHCLERDFG
LYKEIIPELASKNLKNDYRILSQTLCELCDKSPNLFLKKNERLRKCVEVDINNADSSMTRKYRNCIAHLTVVRELKEYIGDICT
VDSYFSIYHYVMQRCITKRENDTKQEEKIKYEDDLLKNHGYTKDFVKALNSPFGYNIPRFKNLSIEQLFDRNEYLTEK (SEQ
ID NO: 24)
>DBYI01000091_43
[Ruminococcus flavefaciens]
MKKKIKARDLREAKKQEKLAAFSAKANTVYENEDKNVEAFPEALNLRSIKKSMNKAAGLKSTLIDGKSLYLTAFGKGNNAVVEH
MIATDDSYSLKTLENEPSLKVKAADELKVTFMSRRPFVQESELSAVNPLHSGKDKPNKSAGQDMLGLKSELEKRYFGKIFDDNL
HIQIIHNILDIEKIIAVYATNITAAIDHMVDDDNEQYLQGDFIGYMNTLNTYEVFMEPSKNPRLDSNARKNIENSREKFEYLLD
TQRLGYLSLEYDKRSKDKRKSEEIKKRLYHLVAFAGQLRQWSFHSVEGLPRTWIYQLDNPKLAQEYRDTLDYFFNERFDAINKD
FIETNNINLHILKEVFPAEDFQKLAALYYDFIVKKTFKNIGFSIKNLREQMLECDEAEKIRSKDMNSVRSKLYKLFDFCIFYQY
FIDEERSRENVNYLRSTLNDEQKDAFYEEEGKRLWSENRKKFIYFCDNINKWVKNDYSDEVAKCIDLNEFRVNSNVSYFSKLLY
AMSFFLDGKEINDLLTTLINKFDNIRSFIDTANFLNIDVKFTKDYDFFNIICDYAGELNIIKNIARMKKPSPSAKKNMYRDALT
ILGIPTEMSDEQLDAEIDKILEKKINPVTGKTEKGKNPFRNFIANNVIENKRFIYVIKFCNPKNVRKLVNNTKVTEFVLKRMPE
TQIDRYFESCIEGNLNPTTEKKIEKLAEMIKNIKFEEFRNVKQKVRDNSQEAVEKERFKAIIGLYLTVIYLLVKNLVNVNSRYV
MAFHCLERDAKLYGVQNIGGDYLALTAKLCAEGDDYGKKLSEAKQNINQDKVQMPKNYFLARNKRWREAIEQDIDNAKKWFIGE
KFNNVKNYRNNVAHLTAIRNCAEFIGEITKIDSYFALYHYLIQRQLAGRLDPNHPGFEKNYPQYAPLFKWNTYVKDMVKALNSP
FGYNIPRFKDLSIDALFDRNEMKEETDDEKKIQT (SEQ ID NO: 25)
>WP_075424065.1
[Ruminococcus flavefaciens]
MIEKKKSFAKGMGVKSTLVSGSKVYMTTFAEGSDARLEKIVEGDSIRSVNEGEAFSAEMADKNAGYKIGNAKFSHPKGYAVVAN
NPLYTGPVQQDMLGLKETLEKRYFGESADGNDNICIQVIHNILDIEKILAEYITNAAYAVNNISGLDKDIIGFGKFSTVYTYDE
FKDPEHHRAAFNNNDKLINAIKAQYDEFDNFLDNPRLGYFGQAFFSKEGRNYIINYGNECYDILALLSGLRHWVVHNNEEESRI
SRTWLYNLDKNLDNEYISTLNYLYDRITNELTNSFSKNSAANVNYIAETLGINPAEFAEQYFRFSIMKEQKNLGFNITKLREVM
LDRKDMSEIRKNHKVFDSIRTKVYTMMDFVIYRYYIEEDAKVAAANKSLPDNEKSLSEKDIFVINLRGSFNDDQKDALYYDEAN
RIWRKLENIMHNIKEFRGNKTREYKKKDAPRLPRILPAGRDVSAFSKLMYALTMFLDGKEINDLLTTLINKFDNIQSFLKVMPL
IGVNAKFVEEYAFFKDSAKIADELRLIKSFARMGEPIADARRAMYIDAIRILGTNLSYDELKALADTFSLDENGNKLKKGKHGM
RNFIINNVISNKRFHYLIRYGDPAHLHEIAKNEAVVKFVLGRIADIQKKQGQNGKNQIDRYYETCIGKDKGKSVSEKVDALTKI
ITGMNYDQFDKKRSVIEDTGRENAEREKFKKIISLYLTVIYHILKNIVNINARYVIGFHCVERDAQLYKEKGYDINLKKLEEKG
FSSVTKLCAGIDETAPDKRKDVEKEMAERAKESIDSLESANPKLYANYIKYSDEKKAEEFTRQINREKAKTALNAYLRNTKWNV
IIREDLLRIDNKTCTLFRNKAVHLEVARYVHAYINDIAEVNSYFQLYHYIMQRIIMNERYEKSSGKVSEYFDAVNDEKKYNDRL
LKLLCVPFGYCIPRFKNLSIEALFDRNEAAKFDKEKKKVSGNS (SEQ ID NO: 26)
>WP_009985792.1
[Ruminococcus flavefaciens FD-1]
MKKKMSLREKREAEKQAKKAAYSAASKNTDSKPAEKKAETPKPAEIISDNSRNKTAVKAAGLKSTIISGDKLYMTSFGKGNAAV
IEQKIDINDYSFSAMKDTPSLEVDKAESKEISFSSHHPFVKNDKLTTYNPLYGGKDNPEKPVGRDMLGLKDKLEERYFGCTFND
NLHIQIIYNILDIEKILAVHSANITTALDHMVDEDDEKYLNSDYIGYMNTINTYDVFMDPSKNSSLSPKDRKNIDNSRAKFEKL
LSTKRLGYFGFDYDANGKDKKKNEEIKKRLYHLTAFAGQLRQWSFHSAGNYPRTWLYKLDSLDKEYLDTLDHYFDKRFNDINDD
FVTKNATNLYILKEVFPEANFKDIADLYYDFIVIKSHKNMGFSIKKLREKMLECDGADRIKEQDMDSVRSKLYKLIDFCIFKYY
HEFPELSEKNVDILRAAVSDTKKDNLYSDEAARLWSIFKEKFLGFCDKIVVWVTGEHEKDITSVIDKDAYRNRSNVSYFSKLMY
AMCFFLDGKEINDLLTTLINKFDNIANQIKTAKELGINTAFVKNYDFFNHSEKYVDELNIVKNIARMKKPSSNAKKAMYHDALT
ILGIPEDMDEKALDEELDLILEKKTDPVTGKPLKGKNPLRNFIANNVIENSRFIYLIKFCNPENVRKIVNNTKVTEFVLKRIPD
AQIERYYKSCTDSEMNPPTEKKITELAGKLKDMNFGNFRNVRQSAKENMEKERFKAVIGLYLTVVYRVVKNLVDVNSRYIMAFH
SLERDSQLYNVSVDNDYLALTDTLVKEGDNSRSRYLAGNKRLRDCVKQDIDNAKKWFVSDKYNSITKYRNNVAHLTAVRNCAEF
IGDITKIDSYFALYHYLIQRQLAKGLDHERSGFDRNYPQYAPLFKWHTYVKDVVKALNAPFGYNIPRFKNLSIDALFDRNEIKK
NDGEKKSDD (SEQ ID NO: 27)
>CDC65743.1
[Ruminococcus sp. CAG:57]
MAKKNKMKPRELREAQKKARQLKAAEINNNAAPAIAAMPAAEVIAPVAEKKKSSVKAAGMKSILVSENKMYITSFGKGNSAVLE
YEVDNNDYNKTQLSSKDNSNIELGDVNEVNITFSSKHGFGSGVEINTSNPTHRSGESSPVRGDMLGLKSELEKRFFGKTFDDNI
HIQLIYNILDIEKILAVYVTNIVYALNNMLGIKDSESYDDFMGYLSARNTYEVFTHPDKSNLSDKVKGNIKKSLSKFNDLLKTK
RLGYFGLEEPKTKDTRASEAYKKRVYHMLAIVGQIRQCVFHDKSGAKRFDLYSFINNIDPEYRDTLDYLVEERLKSINKDFIEG
NKVNISLLIDMMKGYEADDIIRLYYDFIVLKSQKNLGFSIKKLREKMLEEYGFRFKDKQYDSVRSKMYKLMDFLLFCNYYRNDV
AAGEALVRKLRFSMTDDEKEGIYADEAAKLWGKFRNDFENIADHMNGDVIKELGKADMDFDEKILDSEKKNASDLLYFSKMIYM
LTYFLDGKEINDLLTTLISKFDNIKEFLKIMKSSAVDVECELTAGYKLFNDSQRITNELFIVKNIASMRKPAASAKLTMFRDAL
TILGIDDNITDDRISEILKLKEKGKGIHGLRNFITNNVIESSRFVYLIKYANAQKIREVAKDEKVVMFVLGGIPDTQIERYYKS
CVEFPDMNSSLEAKRSELARMIKNISFDDFKNVKQQAKGRENVAKERAKAVIGLYLTVMYLLVKNLVNVNARYVIAIHCLERDF
GLYKEIIPELASKNLKNDYRILSQTLCELCDDRNESSNLFLKKNKRLRKCVEVDINNADSSMTRKYRNCIAHLTVVRELKEYIG
DIRTVDSYFSIYHYVMQRCITKRGDDTKQEEKIKYEDDLLKNHGYTKDFVKALNSPFGYNIPRFKNLSIEQLFDRNEYLTEK
(SEQ ID NO: 28)
>DJXDO1000002_3
[Ruminococcus sp. UBA7013]
MKKQKSKKTVSKTSGLKEALSVQGTVIMTSFGKGNMANLSYKIPSSQKPQNLNSSAGLKNVEVSGKKIKFQGRHPKIATTDNPL
FKPQPGMDLLCLKDKLEMHYFGKTFDDNIHIQLIYQILDIEKILAVHVNNIVFTLDNVLHPQKEELTEDFIGAGGWRINLDYQT
LRGQTNKYDRFKNYIKRKELLYFGEAFYHENERRYEEDIFAILTLLSALRQFCFHSDLSSDESDHVNSFWLYQLEDQLSDEFKE
TLSILWEEVTERIDSEFLKTNTVNLHILCHVFPKESKETIVRAYYEFLIKKSFKNMGFSIKKLREIMLEQSDLKSFKEDKYNSV
RAKLYKLFDFIITYYYDHHAFEKEALVSSLRSSLTEENKEEIYIKTARTLASALGADFKKAAADVNAKNIRDYQKKANDYRISF
EDIKIGNTGIGYFSELIYMLTLLLDGKEINDLLTTLINKFDNIISFIDILKKLNLEFKFKPEYADFFNMTNCRYTLEELRVINS
IARMQKPSADARKIMYRDALRILGMDNRPDEEIDRELERTMPVGADGKFIKGKQGFRNFIASNVIESSRFHYLVRYNNPHKTRT
LVKNPNVVKFVLEGIPETQIKRYFDVCKGQEIPPTSDKSAQIDVLARIISSVDYKIFEDVPQSAKINKDDPSRNFSDALKKQRY
QAIVSLYLTVMYLITKNLVYVNSRYVIAFHCLERDAFLHGVTLPKMNKKIVYSQLTTHLLTDKNYTTYGHLKNQKGHRKWYVLV
KNNLQNSDITAVSSFRNIVAHISVVRNSNEYISGIGELHSYFELYHYLVQSMIAKNNWYDTSHQPKTAEYLNNLKKHHTYCKDF
VKAYCIPFGYVVPRYKNLTINELFDRNNPNPEPKEEV (SEQ ID NO: 29)
>SCH71549.1
[gut metagenome]
MAKKNKMKPRELREAQKKARQLKAAEINNNAAPAIAAMPAAEVIAPVAEKKKSSVKAAGMKSILVSENKMYITSFGKGNSAVLE
YEVDNNDYNKTQLSSKDNSNIELGDVNEVNITFSSKHGFGSGVEINTSNPTHRSGESSPVRGDMLGLKSELEKRFFGKTFDDNI
HIQLIYNILDIEKILAVYVTNIVYALNNMLGIKDSESYDDFMGYLSARNTYEVFTHPDKSNLSDKVKGNIKKSLSKFNDLLKTK
RLGYFGLEEPKTKDTRASEAYKKRVYHMLAIVGQIRQCVFHDKSGAKRFDLYSFINNIDPEYRDTLDYLVEERLKSINKDFIEG
NKVNISLLIDMMKGYEADDIIRLYYDFIVLKSQKNLGFSIKKLREKMLEEYGFRFKDKQYDSVRSKMYKLMDFLLFCNYYRNDV
AAGEALVRKLRFSMTDDEKEGIYADEAAKLWGKFRNDFENIADHMNGDVIKELGKADMDFDEKILDSEKKNASDLLYFSKMIYM
LTYFLDGKEINDLLTTLISKFDNIKEFLKIMKSSAVDVECELTAGYKLFNDSQRITNELFIVKNIASMRKPAASAKLTMFRDAL
TILGIDDNITDDRISEILKLKEKGKGIHGLRNFITNNVIESSRFVYLIKYANAQKIREVAKNEKVVMFVLGGIPDTQIERYYKS
CVEFPDMNSSLEAKRSELARMIKNISFDDFKNVKQQAKGRENVAKERAKAVIGLYLTVMYLLVKNLVNVNARYVIAIHCLERDF
GLYKEIIPELASKNLKNDYRILSQTLCELCDDRNESSNLFLKKNKRLRKCVEVDINNADSSMTRKYRNCIAHLTVVRELKEYIG
DIRTVDSYFSIYHYVMQRCITKRGDDTKQEEKIKYEDDLLKNHGYTKDFVKALNSPFGYNIPRFKNLSIEQLFDRNEYLTEK
(SEQ ID NO: 30)
>SCJ27598.1
[human gut metagenome]
MAKKNKMKPRELREAQKKARQLKAAEINNNAAPAIAAMPAAEVIAPAAEKKKSSVKAAGMKSILVSENKMYITSFGKGNSAVLE
YEVDNNDYNQTQLSSKDNSNIQLGGVNEVNITFSSKHGFESGVEINTSNPTHRSGESSPVRGDMLGLKSELEKRFFGKTFDDNI
HIQLIYNILDIEKILAVYVTNIVYALNNMLGVKGSESHDDFIGYLSTNNIYDVFIDPDNSSLSDDKKANVRKSLSKFNALLKTK
RLGYFGLEEPKTKDNRVSQAYKKRVYHMLAIVGQIRQCVFHDKSGAKRFDLYSFINNIDPEYRDTLDYLVEERLKSINKDFIED
NKVNISLLIDMMKGYEADDIIRLYYDFIVLKSQKNLGFSIKKLREKMLDEYGFRFKDKQYDSVRSKMYKLMDFLLFCNYYRNDI
AAGESLVRKLRFSMTDDEKEGIYADEAAKLWGKFRNDFENIADHMNGDVIKELGKADMDFDEKILDSEKKNASDLLYFSKMIYM
LTYFLDGKEINDLLTTLISKFDNIKEFLKIMKSSAVDVECELTAGYKLFNDSQRITNELFIVKNIASMRKPAASAKLTMFRDAL
TILGIDDKITDDRISGILKLKEKGKGIHGLRNFITNNVIESSRFVYLIKYANAQKIREVAKNEKVVMFVLGGIPDTQIERYYKS
CVEFPDMNSSLGVKRSELARMIKNISFDDFKNVKQQAKGRENVAKERAKAVIGLYLTVMYLLVKNLVNVNARYVIAIHCLERDF
GLYKEIIPELASKNLKNDYRILSQTLCELCDKSPNLFLKKNERLRKCVEVDINNADSSMTRKYRNCIAHLTVVRELKEYIGDIC
TVDSYFSIYHYVMQRCITKRENDTKQEEKIKYEDDLLKNHGYTKDFVKALNSPFGYNIPRFKNLSIEQLFDRNEYLTEK (SEQ
ID NO: 31)
>NZ_ACOK01000100_5
[Ruminococcus flavefaciens FD-1]
MSAMTKGLRNCKGCVNMKKKMSLREKREAEKQAKKAAYSAASKNTDSKPAEKKAETPKPAEIISDNSRNKTAVKAAGLKSTIIS
GDKLYMTSFGKGNAAVIEQKIDINDYSFSAMKDTPSLEVDKAESKEISFSSHHPFVKNDKLTTYNPLYGGKDNPEKPVGRDMLG
LKDKLEERYFGCTFNDNLHIQIIYNILDIEKILAVHSANITTALDHMVDEDDEKYLNSDYIGYMNTINTYDVFMDPSKNSSLSP
KDRKNIDNSRAKFEKLLSTKRLGYFGFDYDANGKDKKKNEEIKKRLYHLTAFAGQLRQWSFHSAGNYPRTWLYKLDSLDKEYLD
TLDHYFDKRFNDINDDFVTKNATNLYILKEVFPEANFKDIADLYYDFIVIKSHKNMGFSIKKLREKMLECDGADRIKEQDMDSV
RSKLYKLIDFCIFKYYHEFPELSEKNVDILRAAVSDTKKDNLYSDEAARLWSIFKEKFLGFCDKIVVWVTGEHEKDITSVIDKD
AYRNRSNVSYFSKLMYAMCFFLDGKEINDLLTTLINKFDNIANQIKTAKELGINTAFVKNYDFFNHSEKYVDELNIVKNIARMK
KPSSNAKKAMYHDALTILGIPEDMDEKALDEELDLILEKKTDPVTGKPLKGKNPLRNFIANNVIENSRFIYLIKFCNPENVRKI
VNNTKVTEFVLKRIPDAQIERYYKSCTDSEMNPPTEKKITELAGKLKDMNFGNFRNVRQSAKENMEKERFKAVIGLYLTVVYRV
VKNLVDVNSRYIMAFHSLERDSQLYNVSVDNDYLALTDTLVKEGDNSRSRYLAGNKRLRDCVKQDIDNAKKWFVSDKYNSITKY
RNNVAHLTAVRNCAEFIGDITKIDSYFALYHYLIQRQLAKGLDHERSGFDRNYPQYAPLFKWHTYVKDVVKALNAPFGYNIPRF
KNLSIDALFDRNEIKKNDGEKKSDD (SEQ ID NO: 200)
>33000062261Ga0099364_10024192_5
[arthropoda-digestive system-cubitermes and nasutitermes termite gut]
MGVKSVLAHGKDEKGHIKLAITAFGKGNKAELAIQTDEKGSNLAKTYKERNITANKIVSEGIQTSGTIAGEGHATFLNNPAEHV
GTDYLKLKETLEMEFFGKSFPGDSVRIQIIHQILDIQKLLGIYITDIIYCINNLRDETHLDHESDIVGLSMSNTNVNLALNQMR
PYFGFFGEAFRPVGDDKVKEITLSDEVRKNIEKIIALEEQKRNPSTPRFKQENINLEIENAMGKFKSKDAFETAKKKYNRIVAD
ETNAKTLRILGAMRQITAHFKDQATLFMSDVELPKILKKEFSKADWQTVEDYYAKLVDRINEGFCKNAATNVHFLTELLPEESK
KQLTEDYFRFAILKEGKNLGVNMKRLREVMFALFVPELTAPETKKRYDSYRAKIYGLTDFLLFKHIHNTKQLEEWVAVLRETSN
EDAKENLYDEFARTAWNTVGDSAKQLIENMQSYFTKKEKEITKTAQPVLSTSSIAHTSKKITQFSSFAKLLAFLCNFWEGKEIN
ELLSAYIHKFENIQEFINLLEKLEGKKPQFTENYALFNEAAGQRAGEIAQNLRILASIGKMKPDLGDAKRQLYKAAIEMLGIDT
EEYISDEWLEPNMLLAQPPKEPKKDNEKYRKEPHKYSYEKDMETYRKKLREYEETWRSLIDYEYLMPETNPFRNFVAKQVIESR
RFMYLVRYTKPKTVRALMSNRAIVHYVLSRIADIQDHHMTESQIDRYYQNLPQYNEQQHKNVSLETKIDALADYLCKYTFEKNV
LKQKNGIVLNTKSATKNVEIEHLKALTGLYLTVAYIAVKNLVKANARYYIAFSIFERDYALFEKKLGKDTLEKYVKPFKYIDKG
EEKEGKNNFFALTEYLLDKDNSLRYQWNNDLSDEENKQALRKHLDKKEIRSQRHFSQYWLDIFARQIENAKKTSESGYLLTAAR
NCALHLNVLTALPEFVGEFRKTGDKMTSYFELYHFLLQKLMLAEAGLNLDEYRERIDTYQTACKDLINITYVSLGYNLPRYKNL
TCEPLFDEESATGKERQTRLDEKSKEKKQRKGGQK (SEQ ID NO: 201)
>CDZK01015063_14
[gut metagenome]
MAKKNKMKPRERREAQKKARQLKAAEINNNAVPAIAAMHAAEVIAPAAEKKKSSVKAAGMKSILVSENKMYITSFGKGNSAVLE
YEVDNNDYNQTQLSSKDNSNIELCGVTKVNITFSSKHGFESGVEINTSNPTHRSGESSPVRGDMLGLKSELEKRFFGKTFDDNI
HIQLIYNILDIEKILAVYVTNIVYALNNMLGEGDESNYDFMGYLSTFNTYKVFTNPNGSTLSDDKKENIRKSLSKFNALLKTKR
LGYFGLEEPKTKDTRASEAYKKRVYHMLAIVGQIRQCVFHDKSGAKRFDLYSFINNIYPEYRDTLDYLVEERLKSINKDFIQGN
KVNISLLIDMMKGYEADDIIRLYYDFIVLKSQKNLGFSIKKLREKMLDEYGFRFKDKQYDSVRSKMYKLMDFLLFCNYYRNDVV
AGEALVRKLRFSMTDDEKEGIYADEAAKLWGKFRNDFENIADHMNGDVIKELGKADMDFDEKILDSEKKNASDLLYFSKMIYML
TYFLDGKEINDLLTTLISKFDNIKEFLKIMKSSAVDVECELTAGYKLFNDSQRITNELFIVKNIASMRKPAASAKLTMFRDALT
ILGIDDKITDDRISEILKLKEKGKGIHGLRNFITNNVIESSRFVYLIKYANAQKIREVAKNEKVVMFVLGGIPDTQIERYYKSC
VEFPDMNSSLEAKRSELARMIKNISFDDFKNVKQQAKGRENVAKERAKAVIGLYLTVMYLLVKNLVNVNARYVIAIHCLERDFG
LYKEIIPELASKNLKNDYRILSQTLCELCDDRDESPNLFLKKNKRLRKCVEVDINNADSSMTRKYRNCIAHLTVVRELKKYIGD
IRTVDSYFSIYHYVMQRCITKREDDTKQEEKIKYEDDLLKNHGYTKDFVKALNSPFGYNIPRFKNLSIEQLFDRNEYLTEK
(SEQ ID NO: 202)
>CEAA01017658_2
[gut metagenome]
MAKKNKMKPRELREAQKKARQFKAAEINNNAAPAIAAMPAAEVIAPVAEKKKSSVKAAGMKSILVSENKMYITSFGKGNSAVLE
YEVDNNDYNKTQLSSKDNSNIELCGVNEVNITFSSKHGFESGVEINTSNPTHRSGESSPVRWDMLGLKSELEKRFFGKTFDDNI
HIQLIYNILDIEKILAVYVTNIVYALNNMLGVKGSESHDDFIGYLSTNNIYDVFIDPDNSSLSDDKKANVRKSLSKFNVLLKTK
RLGYFGLEEPKTKDTRVSQAYKKRVYHMLAIVGQIRQCVFHDKSGAKRFDLYSFINNIDPEYRETLDYLVDERFDSINKGFIQG
NKVNISLLIDMMKGYEADDIIRLYYDFIVLKSQKNLGFSIKKLREKMLEEYGYRFKDKQYDSVRSKMYKLMDFLLFCNYYRNDV
VAGEALVRKLRFSMTDDEKEGIYADEASKLWGKFRNDFENIADHMNGDVIKELGKADMDFDEKILDSEKKNASDLLYFSKMIYM
LTYFLDGKEINDLLTTLISKFDNIKEFLKIMKSSAVDVECELTAGYKLFNDSQRITNELFIVKNIASMRKPASSAKLTMFRDAL
TILGIDDNITDDRISEILKLKEKGKGIHGLRNFITNNVIESSRFVYLIKYANAQKIREVAKNEKVVMFVLGGIPDTQIERYYKS
CVEFPDMNSSLEVKRSELARMIKNISFDDFKNVKQQAKGRENVAKERAKAVIGLYLTVMYLLVKNLVNVNARYVIAIHCLERDF
GLYKEIIPELASKNLKNDYRILSQTLCELCDNGDESPNLFLKKNKRLRKCVEVDINNADSNMTRKYRNCIAHLTVVRELKEYIG
DIRTVDSYFSIYHYVMQRCITKREDDTKQEEKIKYEDDLLKNHGYTKDFVKALNSPFGYNIPRFKNLSIEQLFDRNEYLTEK
(SEQ ID NO: 203)
>OCTW011587266_5
[gut metagenome]
MKQNDRENNNKIKKSAAKAVGVKSLARLSDGSTVVSSFGKGAAAELESLITGGEIRKLSDKAILEITDDTQNKNAYNVKSSRIP
NLTARTDKLSDKSGMDDLGFKRELELEVFGQCFDDSIHIQIAHAVFDIQKSLAAVIPNVLYTLNNLDRSYSTDNTSDKKDIIGN
TLNYQHSYESFNVEKRGEFTEYYNAAKDRFSYFPDILCVLEKVNGKDRYQPKSEKDAFNVLSSVNMLRNSLFHFAPKSNDGKAR
IAVFKNQFDSDFSHITSTVNKIYSAKIAGVNENFLNNEGNNLYIILKATNWDIKKIVPQLYRFSVLKSDKNMGFNMRKLREFAV
ESKNIDLSRLNDKFLTNNRKKLYKVIDFIIYYHLNKVLKDSFVDDFVAALRASQSEEEKEKLYAQYSERLFADEGLKSAIKKAV
DMISDTKSNIFKMKTPLDKALIENIKVNSDASDFCKLIYVFTRFLDGKEINILLNSLIKKFQDIHSFNTTVKKLSENNLIINAD
YVDDYSLFEQSGTVARELMLIKSISKMDFGLDNINLSFMYDDALRTLGVSDENLPEVKREYFGKTKNLSAYIRNNVLENRRFKY
VIKYIHPSDVQKIACNKAIAGFVLNRMPDTQIKRYYDSLINKGATDIQAQAKALLDCITGISFDAIKDDKHLHKSKEKSPQRSA
DRERKKAMLTLYYTIVYIFVKQMLHINSLYTIGFFYLERDQRFIYSRAKKENKNPSKNSYLNDFRSVTAYFIPSEIMKRIEKNE
NKGFLEDFEALWNSCGKTSRLRKEDVLLYARYISPDHALKNYKMILNSYRNKIAHINVIMSAGKYTGGIKRMDSYFSVFQHLVQ
CDILSNPNNKGKCFESESLKPLLLDMKFDGTDEKLYSKRLTRALNIPFGYNVPRYKNLTFEKIYLKSSINE (SEQ ID NO:
204)
>OCVV011003687_3
[gut metagenome]
MAKKSKGMKPKEKRELEKQKRIQKAVVKSADDTPVKAEATKAVSVNTDLSVENKHNKKSAAKALGLKSGLVIGDDLYLTSFGRG
NEAKLEKKISGETVENLGIGAFEVTERDESTLTLESGRIKDKTARPKDPRHITVDAQGKFKEDMLGIRSVLEEKIFVGKKFNDN
IHVQLAYNILDIEKIMAQYVSDIVYMLHNTDKTERNDNLMGYMSIQNPYSVFCNPNFSAAKTQRNVVRQKQELDNIIKSGRLGY
FGEAFMVYSGNSSKLRPEKEIYHIFALMASLRQSYFHGYVKDTDYQGPTWPYTLEDKLKDPSHEFRETLDKIFDEGFSKISKNF
GKQNNVNLQILEEMLGELYGSTDSKSLACDYYDFIQLKKHKYLGFSIKRLRETMLETTPAACYKAECYNSIRHKLYLLIDFLIY
DLYYNRKPARIEEIVDKLRESVNDEEKESIYSAETKYVYEALGKVLVRSLKKYLNGATIRDLKNRYDAKTANRIWDISEHSKSG
HVNCFCKLIYMMTLMLDGKEINDLLTTLVNKFDNIASFIDVMDELGLEHSFTDNYKMFADSKAICLDLQFINSFARMSKIDDEK
SKRQLFRDALVVLDIGDKNEDWIEKYLTSDIFKRDENGNKIDGEKRDFRNFIANNVIKSARFKYLVKYSSADGMIKLKKNEKLI
SFVLEQLPETQIDRYYESCGLDCAVADRKVRIEKLTGLIRDMRFDNFRGVNYSNDACKKDKQAKAKYQAIISLYLMVLYQIVKN
MIYVNSRYVIAFHCLERDLLFFNIELDNSYQYSNCNELTDMFIKDKYMKEGALGFNMKAGRYLTKNIGNCSNELRKIYRNQVDH
FAVVRKIGNYAADIKSIGSWFELYHYVMQRIVFDEYRFALNNTESNYKNSIIKHHTYCKDMVKALNTPFGYDLPRYQNLSIGDL
FDRNNYLNKTKESIETKSPIDNP (SEQ ID NO: 205)
>OCVV011003687_3
[gut metagenome]
MVQREGCVMAKKSKGMKPKEKRELEKQKRIQKAVVKSADDTPVKAEATKAVSVNTDLSVENKHNKKSAAKALGLKSGLVIGDDL
YLTSFGRGNEAKLEKKISGETVENLGIGAFEVTERDESTLTLESGRIKDKTARPKDPRHITVDAQGKFKEDMLGIRSVLEEKIF
VGKKFNDNIHVQLAYNILDIEKIMAQYVSDIVYMLHNTDKTERNDNLMGYMSIQNPYSVFCNPNFSAAKTQRNVVRQKQELDNI
IKSGRLGYFGEAFMVYSGNSSKLRPEKEIYHIFALMASLRQSYFHGYVKDTDYQGPTWPYTLEDKLKDPSHEFRETLDKIFDEG
FSKISKNFGKQNNVNLQILEEMLGELYGSTDSKSLACDYYDFIQLKKHKYLGFSIKRLRETMLETTPAACYKAECYNSIRHKLY
LLIDFLIYDLYYNRKPARIEEIVDKLRESVNDEEKESIYSAETKYVYEALGKVLVRSLKKYLNGATIRDLKNRYDAKTANRIWD
ISEHSKSGHVNCFCKLIYMMTLMLDGKEINDLLTTLVNKFDNIASFIDVMDELGLEHSFTDNYKMFADSKAICLDLQFINSFAR
MSKIDDEKSKRQLFRDALVVLDIGDKNEDWIEKYLTSDIFKRDENGNKIDGEKRDFRNFIANNVIKSARFKYLVKYSSADGMIK
LKKNEKLISFVLEQLPETQIDRYYESCGLDCAVADRKVRIEKLTGLIRDMRFDNFRGVNYSNDACKKDKQAKAKYQAIISLYLM
VLYQIVKNMIYVNSRYVIAFHCLERDLLFFNIELDNSYQYSNCNELTDMFIKDKYMKEGALGFNMKAGRYLTKNIGNCSNELRK
IYRNQVDHFAVVRKIGNYAADIKSIGSWFELYHYVMQRIVFDEYRFALNNTESNYKNSIIKHHTYCKDMVKALNTPFGYDLPRY
QNLSIGDLFDRNNYLNKTKESIETKSPIDNP (SEQ ID NO: 206)
>ODAI010069496_4
[gut metagenome]
MAKKIKPRDLRESKRQEKLAAYSVKANEKKTVHTTEEKPAAVLTVTASENKKNKKTSNKAAGLKSTLVYGNKLYITSFGKGNEA
IIEQKVDTSDYSFSDVRSDPSLKIKSADDVSISFSSERPFINKSLLTAVNPLHSGKDKPKRAAGQDMLGLKSELEKRYFGKTFD
DNIHIQLIHNILDIEKIFAVYSANIVAALDHMIDGDDKEYLENDFIGYMNTLNTYEVFMDPSKVFSDCDNRKKNIDKSREKFET
LIDSKRLRYFGFEYDPDGKNKNEEMKKRLYHLVAFAGQLRQWSFHSEGNFQLEWLYKLDDSRIAQEYRDTLDYFFDRRFDELNN
NFVEQNATNLFILKETFPGEDLKAVTDLYYDFIIVKSQKNIGFSIKKLREKMLGTEEAAPIKAHDMDSYRPKLYKLIDFCIFKH
YHEYTEISEKNVDTLRAAVSEEQKESFYADEAKRLWGIFDKQFLGFCKKINVWVNGSHEKEILGYIDKDAYRRKSDVSYFSKFL
YAMSFFLDGKEINDLLTTLINKFDNIASFISTAKELDAEIDRILEKKLDPVTGKPLKGKNSFRNFIANNVIENKRFIYVIKFCN
PKNVLKLVKNTKVTEFVLKRMPESQIDRYYSSCIDTEKNPSVDKKISDLAEMIKKIAFDDFRNVRQKTRTREESLEKERFKAVI
GLYLTVVYLLIKNLVNVNSRYVMAFHCLERDAKLYGINIGKNYIELTEDLCRENENSRSAYLARNKRLRDCVKQNIDNAKNMKS
KEKQRVFFKDYSTVVPFLEKVFYYGSFSSADFEEMDMMKKSKYSYYKRILEYAFGDLLFERKNISKTN (SEQ ID NO:
207)
>ODAI011611274_2
[gut metagenome]
MKKKISLKEQRNTKKAENKLKYQKAQAERAAAAQQTAAGAESEENPCFDVVKDTKRKALNPLHVEIEAPSAKKSSVKANGLKSL
LLTDGKTVMTSFGRGSEANVEKRFDETGTKTFDRDPELFSAKPLETGYRIQRFNASPKDAGLAYRPAGVRPDQIGAKAALEKRY
FGKETPGDNIHVQIAYQIQDIEKLLAVYISNIIYAVNNVTGVSAMKDSKGRPVDLLGDYGILGEEGLTKRLQRIPEQADEEAKA
LQAFLCSERLSYFGKEFCLVRNSPKQPDKEEKRQYKLMRVLCLLGELRQFLVHGKKKEKEFAWLYRLDRQLSQEYRKLLGEFYD
AQVDKVNKSFLTNSTVNLEVLFRALKTGTDPERKTVTQEYYQFTVRKEDGNLGFSLKTLREILLSAYKHEVRDKEYDSIRHKLY
QLFSFALYHYYKTGVGAERREAFVAKLRAVMTAEAKQRAYADEAAEIWNDEGSGIRAAFLEILEAVDFGSAVKGIKARSSVAGD
KRFAEWLEEVRIRPEGVSCFTKLMYLLTRFLDGKEINELLTGLINKLENIQSFLDVMQQEHAETGLSDAFSFFEYSGEIAAELR
MTRSFARMAAADPEAKRFMVVDGAKLLGFNPKDTESEDEGIIRAIYGDACAEYLQFSEEEKEAFYVQEGLYGKEREKFSPYAYF
HTDTSLRNFIAKNVVESARFRYVIRYVSPEIARKYARQEALVRFALHRVPLLQLRRYYQSCCGPKKDPDAAECVDFLAGVVNRV
DFANFTDVRTGDSSKSEQEKKQKYQAIVGLYLTVVYWIVKNLVNVNSRYVMAFHILERDTVLLEGKRLFVGGMKAEDPFLLTDG
YVSRQDAYVRKRIGENKRANRHGLNCVLENRNALGSDPASTDAAASLIWSYRNAAAHLTAVAAAQEYVSELREIHSYFEVYHYA
MQRYLKSGAEFAELVSKNGPASGKIAAWANAVDRCHSFCKDWLWLLNVPFAYNPARYKNLSIANLFDKNEAAPVTEDASEQKED
E (SEQ ID NO: 208)
>OATA01000148_47
[human gut metagenome]
MAKKNKMKPRELREAQKKARQLKAAEINNNAVPAIAAMPAAEAAAPAAEKKKSSVKAAGMKSILVSENKMYITSFGKGNSAVLE
YEVDNNDYNKTQLSSKDNSNIELCDVGKVNITFSSRRGFESGVEINTSNPTHRSGESSSVRGDMLGLKSELEKRFFGKNFDDNI
HIQLIYNILDIEKILAVYVTNIVYALNNMLGEGDESNYDFMGYLSTFNTYKVFTNPNGSTLSDDKKENIRKSLSKFNALLKTKR
LGYFGLEEPKTKDTRASEAYKKRVYHMLAIVGQIRQCVFHDKSGAKRFDLYSFINNIDPEYRETLDYLVDERFDSINKGFIQGN
KVNISLLIDMMKGYEADDIIRLYYDFIVLKSQKNLGFSIKKLREKMLDEYGFRFKDKQYDSVRSKMYKLMDFLLFCNYYRNDIA
AGESLVRKLRFSMTDDEKEGIYADEAAKLWGKFRNDFENIADHMNGDVIKELGKADMDFDEKILDSEKKNASDLLYFSKMIYML
TYFLDGKEINDLLTTLISKFDNIKEFLKIMKSSAVDVECELTAGYKLFNDSQRITNELFIVKNIASMRKPAASAKLTMFRDALT
ILGIDDKITDDRISEILKLKEKGKGIHGLRNFITNNVIESSRFVYLIKYANAQKIREVAKNEKVVMFVLGGIPDTQIERYYKSC
VEFPDMNSSLGVKRSELARMIKNISFDDFKNVKQQSKGRENVAKERAKAVIGLYLTVMYLLVKNLVNVNARYVIAIHCLERDFG
LYKEIIPELASKNLKNDYRILSQTLCELCDKSPNLFLKKNERLRKCVEVDINNADSSMTRKYRNCIAHLTVVRELKEYIGDICT
VDSYFSIYHYVMQRCITKRENDTKQEEKIKYEDDLLKNHGYTKDFVKALNSPFGYNIPRFKNLSIEQLFDRNEYLTEK (SEQ
ID NO: 209)
>OAVJ01001264_7
[human gut metagenome]
MAKKNKMKPRELREAQKKARQLKAAEINNNAAPAIAAMPAAEAEKKKSSVKAAGMKSILVSENKMYITSFGKGNSAVLEYEVDK
VDNNVYNQTQLSSKGSSNIKLCGVNEVNITFSSKHGFESGVEINTSNPTHRSGESSPVRGDMLGLKSELEKRFFGKTFDDNIHI
QLIYNILDIEKILAVYVTNIVYALNNMLGIKGSESYDDFMGYLSARNTYEVFTHPDKSSLSDDKKANVRKSLSKFNVLLKTKRL
GYFGLEEPKTKDTRVSQAYKKRVYHMLAIVGQIRQSVFHDKSSKLHEDLYSFIDIIDSEYRETLDYLVDERFDSINKGFIQGNK
VNISLLIDMMKDDYEADDIIRLYYDFIVLKSQKNLGFSIKKLREKMLDEYGFRFKDKQYDSVRSKMYKLMDFLLFCNYYRNDVI
AGEALVRKLRFSMTDDEKEGIYADEAAKLWGKFRNDFENIADHMNGDVIKELGKADMDFDEKILDSEKKNASDLLYFSKMIYML
TYFLDGKEINDLLTTLISKFDNIKEFLKIMKSSAVDVECELTAGYKLFNDSQRITNELFIVKNIASMRKPAASAMLTMFRDALT
ILGIDDKITDDRISEILKLKEKGKGIHGLRNFITNNVIESSRFVYLIKYANAQKIREVAKNEKVVMFVLGGIPDTQIERYYKSC
VEVPDMNSSLEAKRSELARMIKSISFDDFKNVKQQAKGRENVAKEMAKAVIGLYLTVMYLLVKNLVNVNARYVIAIHCLERDFG
LYKEIISELASKNLKNDYRILSQTLCELCDNCDESPNLFLKKNKRLRKCVEVDINNADSSMTRKYRNCIAHLTVVRELKEYIGD
IRTVDSYFSIYHYVMQRCITKREDDKKQEEKIKYEDDLLKNHGYTKDFVKALNSPFGYNIPRFKNLSIEQLFDRNEYLTEK
(SEQ ID NO: 210)
>OBAE01000973_3
[human gut metagenome]
MAKKNKMKPRELREAQKKARQLKAVEINNNAVPEIAAMPAAEVIAPVAEKKKSSVKAAGMKSILVSENKMYITSFGKGNSAVLE
YEVDNNDYNKTQLSSKNSSNIELRGVNEVNITFSSKHGFESGVEINTSNPTHRSGESSPVRWDMLGLKSELEKRFFGKTFDDNI
HIQLIYNILDIEKILAVYVTNIVYALNNMLGIKGSESYDDFMGYLSARNTYEVFTHPDKSSLSDDKKANVRKSLSKFNVLLKTK
RLGYFGLEEPKTKDTRVSQAYKKRVYHMLAIVGQIRQSVFHDKSSKLHEDLYSFIDIIDSEYRETLDYLVDERFDSINKGFIQG
NKVNISLLIDMMKDDYEADDIIRLYYDFIVLKSQKNLGFSIKKLREKMLDEYGFRFKDKQYDSVRSKMYKLMDFLLFCNYYRND
VIAGEALVRKLRFSMTDDEKEGIYADEAAKLWGKFRNDFENIADHMNGDVIKELGKADMDFDEKILDSEKKNASDLLYFSKMIY
MLTYFLDGKEINDLLTTLISKFDNIKEFLKIMKSSAVDVECELTAGYKLFNDSQRITNELFIVKNIASMRKPAASAKLTMFRDA
LTILGIDDKITDDRISEILKLKEKGKGIHGLRNFITNNVIESSRFVYLIKYANAQKIREVAKNEKVVMFVLGGIPDTQIERYYK
SCVEFPDMNSSLEAKRSELARMIKNIRFDDFKNVKQQAKGRENVAKERAKAVIGLYLTVMYLLVKNLVNVNARYVIAIHCLERD
FGLYKEIIPELASKNLKNDYRILSQTLCELCDDRDESPNLFLKKNKRLRKCVEVDINNADSSMTRKYRNCIAHLTVVRELKEYI
GDIYAVDSYFSIYHYVMQRCITKRENDTKQEEKIKYEDNLLKNHGYTKDFVKALNSPFGYNIPRFKNLSIEQLFDRNEYLTEK
(SEQ ID NO: 211)
>OBAR01000289_55
[human gut metagenome]
MAKKNKMKPRELREAQKKARQLKAAEINNNAAPAIAAMPAAEVIAPAAEKKKSSVKAAGMKSIFVSENKMYITSFGKGNSAVLE
YEVDNNDYNQTQLSSKGSSNIELHGVNEVNITFSSKHGFGSGVEINTSNPTHRSGESSPVRWDMLGLKSELEKRFFGKTFDDNI
HIQLIYNILDIEKILAVYVTNIVYALNNMLGVKGSESYDDFMGYLSARNTYEVFTHPDKSNLSDKAKGNIKKSFSTFNDLLKTK
RLGYFGLEEPKTKDTRVSQAYKKRVYHMLAIVGQIRQSVFHDKSSKLDEDLYSFIDIIDPEYRETLDYLVDERFDSINKGFIQG
NKVNISLLIDMMKGYEADDIIRLYYDFIVLKSQKNLGFSIKKLREKMLDEYGFRFKDKQYDSVRSKMYKLMDFLLFCNYYRNDV
AAGEALVRKLRFSMTDDEKEGIYADEAAKLWGKFRNDFENIADHMNGDVIKELGKADMDFDEKILDSEKKNASDLLYFSKMIYM
LTYFLDGKEINDLLTTLISKFDNIKEFLKIMKSSAVDVECELTAGYKLFNDSQRITNELFIVKNIASMRKPAASAKLTMFRDAL
TILGIDDNITDDRISEILKLKEKGKGIHGLRNFITNNVIESSRFVYLIKYANAQKIREVAENEKVVMFVLGGIPDTQIERYYKS
CVEVPDMNSSLEAKRSELARMIKNISFDDFKNVKQQAKGRENVAKERAKAVIGLYLTVMYLLVKNLVNVNARYVIAIHCLERDF
GLYKEIIPELASKNLKNDYRILSQTLCELCDDRDESPNLFLKKNKRLRKCVEVDINNADSSMTRKYRNCIAHLTVVRELKEYIG
DIRTVDSYFSIYHYVMQRCITKREDDKKQEEKIKYEDDLLKNHGYTKDFVKALNSPFGYNIPRFKNLSIEQLFDRNEYLTEK
(SEQ ID NO: 212)
>OBCV01000332_2
[human gut metagenome]
MAKKNKMKPRELREAQKKARQLKAAEINNNAAPAIAAMPAAQVIAPAAEKKKSSVKAAGMKSILVSENKMYITSFGKGNSAVLE
YEVDKVDNNNYNKTQLSSKDNSNIELGDVNEVNITFSSKHGFESGVEINTSNPTHRSGESSPVRWDMLGLKSELEKRFFGKTFD
DNIHIQLIYNILDIEKILAVYVTNIVYALNNMLGIKGSESYDDFMGYLSARNTYEVFTHPDKSNLSDKVKGNIKKSLSKFNDLL
KTKRLGYFGLEEPKTKDTRVSQAYKKRVYHMLAIVGQIRQSVFHDKSSKLDEDLYSFIDIIDSEYRETLDYLVDERFDSINKGF
IQGNKVNISLLIDMMKGYEADDIIRLYYDFIVLKSQKNLGFSIKKLREKMLDEYGFRFKDKQYDSVRSKMYKLMDFLLFCNYYR
NDVVAGEALVRKLRFSMTDDEKEGIYADEASKLWGKFRNDFENIADHMNGDVIKELGKADMDFDEKILDSEKKNASDLLYFSKM
IYMLTYFLDGKEINDLLTTLISKFDNIKEFLKIMKSSAVDVECELTAGYKLFNDSQRITNELFIVKNIASMRKPASSAKLTMFR
DALTILGIDDNITDDRISEILKLKEKGKGIHGLRNFITNNVIESSRFVYLIKYANAQKIRKVAKNEKVVMFVLGGIPDTQIERY
YKSCVEFPDMNSSLEVKRSELARMIKNISFDDFKNVKQQAKGRENVAKERAKAVIGLYLTVMYLLVKNLVNVNARYVIAIHCLE
RDFGLYKEIIPELASKNLKNDYRILSQTLCELCDKSPNLFLKKNRRLRKCVEVDINNADSSMTRKYRNCIAHLTVVRELKEYIG
DIRTVDSYFSIYHYVMQRCITKRENDTKQEEKIKYEDDLLKNHGYTKDFVKALNSPFGYNIPRFKNLSIEQLFDRNEYLTEK
(SEQ ID NO: 213)
>OBDE01000870_1
[human gut metagenome]
MAKKNKMKPRELREAQKKARQLKAAEINNNAAPAIAAMPAAEAAAPAAEKKKSSVKAAGMKSILVSENKMYITSFGKGNSAVLE
YEVDNNDYNQTQLSSKGSSNIELHGVNEVNITFSSKHGFESGVEINTSNPTHRSGESSPVRWDMLGLKSELEKRFFGKTFDDNI
HIQLIYNILDIEKILAVYVTNIVYALNNMLGVKGSESHDDFIGYLSTNNTYDVFIDPDNSSLSDDKKANVRKSLSKFNVLLKTK
RLGYFGLEEPKTKDTRVSQAYKKRVYHMLAIVGQIRQCVFHDKSGAKRFDLYSFINNIDPEYRETLDYLVDERFDSINKGFIEG
NKINISLLIDMMKGYEADDIIRLYYDFIVLKSQKNLGFSIKKLREKMLDEYGFRFKDKQYDPVRSKMYKLMDFLLFCNHYRNDV
AAGEALVRKLRFSMTDDEKEGIYADEAAKLWGKFRNDFENIADHMNGDVIKELGKADMDFDEKILDSEKKNASDLLYFSKMIYM
LTYFLDGKEINDLLTTLISKFDNIKEFLKIMKSSAVDVECELTAGYKLFNDSQRITNELFIVKNIASMRKPAASAKLTMFRDAL
TILGIDDNITDDRISEILKLKEKGKGIHGLRNFITNNVIESSRFVYLIKYANAQKIREVAKNEKVVMFVLGGIPDTQIERYYKS
CVEFPDMNSSLEAKRSELARMIKNISFDDFKNVKQQAKGRENVAKERAKAVIGLYLTVMYLLVKNLVNVNARYVIAIHCLERDF
GLYKEIIPELASKNLKNDYRILSQTLVNFVMIVMSRRICS (SEQ ID NO: 214)
>OBII01002626_5
[human gut metagenome]
MKSILVSKNKMYITSFGKGNSAVLEYEVDNNDYNKTQLSSKDNSNIELRGVTKVNITFSSKHGLESGVEINTSNPTHRSGESSP
VRWDMLGLKSELEKRFFGKTFDDNIHIQLIYNILDIEKILAVYVTNIVYALNNMLGVKGSESHDDFIGYLSTNNTYDVFIDPDN
SSLSDDKKANVRKSLSKFNALLKTKRLGYFGLEEPKTKDNRVSEAYKKRVYHMLAIVGQIRQCVFHDKSGAKRFDLYSFINNID
PEYRETLDYLVDERFDSINKDFIQGNKVNISLLIDMMKGYEADDIIRLYYDFIVLKSQKNLGFSIKKLREKMLDEYGFRFKDKQ
YDSVRSKMYKLMDFLLFCNYYRNDVVAGEALVRKLRFSMTDDEKEGIYADEAAKLWGKFRNDFENIADHMNGDVIKELGKADMD
FDEKILDSEKKNASDILYFSKMIYMLTYFLDGKEINDLLTTLISKFDNIKEFLKIMKSSAVDVECELTAGYKLFNDSQRITNEL
FIVKNIASMRKPAASAKLTMFRDALTILGIDDNITDDRISEILKLKEKGKGIHGLRNFITNNVIESSRFVYLIKYANAQKIREV
AKNEKVVMFVLGGIPDTQIERYYKSCVEFPDMNSSLEVKRSELARMIKNISFDDFKNVKQQAKGRENVAKERAKAVIGLYLTVM
YLLVKNLVNVNARYVIAIHCLERDFGLYKEIIPELASKNLKNDYRILSQTLCDDRDESPNLFLKKNKRLRKCVEVDINNADSSM
TRKYRNCIAHLTVVRELKEYIGDIRTVDTYFSIYHYVMQRCITKREDDTKQEEKIKYEDDLLKNHGYTKDFVKALNSPFGYNIP
RFKNLSIEQLFDRNEYLTEK (SEQ ID NO: 215)
>OBII01002626_3
[human gut metagenome]
MYITSFGKGNSAVLEYEVDNNDYNKTQLSSKDNSNIELRGVTKVNITFSSKHGLESGVEINTSNPTHRSGESSPVRWDMLGLKS
ELEKRFFGKTFDDNIHIQLIYNILDIEKILAVYVTNIVYALNNMLGVKGSESHDDFIGYLSTNNTYDVFIDPDNSSLSDDKKAN
VRKSLSKFNALLKTKRLGYFGLEEPKTKDNRVSEAYKKRVYHMLAIVGQIRQCVFHDKSGAKRFDLYSFINNIDPEYRETLDYL
VDERFDSINKDFIQGNKVNISLLIDMMKGYEADDIIRLYYDFIVLKSQKNLGFSIKKLREKMLDEYGFRFKDKQYDSVRSKMYK
LMDFLLFCNYYRNDVVAGEALVRKLRFSMTDDEKEGIYADEAAKLWGKFRNDFENIADHMNGDVIKELGKADMDFDEKILDSEK
KNASDILYFSKMIYMLTYFLDGKEINDLLTTLISKFDNIKEFLKIMKSSAVDVECELTAGYKLFNDSQRITNELFIVKNIASMR
KPAASAKLTMFRDALTILGIDDNITDDRISEILKLKEKGKGIHGLRNFITNNVIESSRFVYLIKYANAQKIREVAKNEKVVMFV
LGGIPDTQIERYYKSCVEFPDMNSSLEVKRSELARMIKNISFDDFKNVKQQAKGRENVAKERAKAVIGLYLTVMYLLVKNLVNV
NARYVIAIHCLERDFGLYKEIIPELASKNLKNDYRILSQTLCDDRDESPNLFLKKNKRLRKCVEVDINNADSSMTRKYRNCIAH
LTVVRELKEYIGDIRTVDTYFSIYHYVMQRCITKREDDTKQEEKIKYEDDLLKNHGYTKDFVKALNSPFGYNIPRFKNLSIEQL
FDRNEYLTEK (SEQ ID NO: 216)
>OBJF01000033_8
[human gut metagenome]
MAKKKRITAKERKQNHRELLMKKADSNAEKEKAKKPVVENKPDTAISKDNTPKPNKEIKKSKAKLAGVKWVIKANDDVAYISSF
GKGNNSVLEKRIMGDVSSNVNKDSHMYVNPKYTKKNYEIKNGFSSGSSLVTYPNKPDKNSGMDALCLKPYFEKDFFGHIFTDNM
HIQAIYNIFDIEKILAKHITNIIYTVNSFDRNYNQSGNDTIGFGLNYRVPYSEYGGGKDSNGEPKNKFKWEKRDNFSKFYNESK
PHLGYYENIFYDHGEPISEEKFYNYLNILNFIRNNTFHYKDNDIELYSENYSEEYVFINCLNKFVKNKFKNVNKNFISNEKNNL
YIILNAYGKDTENVEVVKKYSKELYKLSVLKTNKNLGVNVKKLRESAIEYGYCPLPYDKEKEVAKLSSVKHKLYKTYDFVITHY
LNSNDKILLEIVEALRLSKNDDEKENVYKKYAEKLFKADDVINPIKAISKLFVEKGNKLFKEKIIIKKEYIEDVSIDKNIYDFT
KVIFFMTCFLDGKEINDLLTNIISKLQIIEDHNNVIKFISHNKDAVYKDYSDKYAIFRNAGKIATELEAIKSIARMENKIENAS
QEPLLNDALLSLGVSDDTKVLENTYKKYFDSKEKTDKQSQKVSTFLMNNVINNNRFKYVIKYINPADINGLAKNRYLVKFVLSK
IPEEQIDSYYKLFSNEEEPGCEEKIKLLTKKISKLNFQTLFENNKIPNVEKEKKKAIITLYFTIVYILVKNLVNINGLYTLALY
FVERDGYFYKDICGKKDKKKSYNDVDYLLLPEIFSGSKYREETKNLKLPKEKDRDIMKKYLPNDKDREKYNKFFTAYRNNIVHL
NIIAKLSELTKNIDKDINSYFDIYHYCTQRVMFNYCKEKNDVVLAKMKDLAHIKSDCNEFSSKHTYPFSSAVLRFMNLPFAYNV
PRFKNLSYKKFFDKQWLKHYENLNDFIRILY (SEQ ID NO: 217)
>OBJF01000033_8
[human gut metagenome]
MAKKKRITAKERKQNHRELLMKKADSNAEKEKAKKPVVENKPDTAISKDNTPKPNKEIKKSKAKLAGVKWVIKANDDVAYISSF
GKGNNSVLEKRIMGDVSSNVNKDSHMYVNPKYTKKNYEIKNGFSSGSSLVTYPNKPDKNSGMDALCLKPYFEKDFFGHIFTDNM
HIQAIYNIFDIEKILAKHITNIIYTVNSFDRNYNQSGNDTIGFGLNYRVPYSEYGGGKDSNGEPKNKFKWEKRDNFSKFYNESK
PHLGYYENIFYDHGEPISEEKFYNYLNILNFIRNNTFHYKDNDIELYSENYSEEYVFINCLNKFVKNKFKNVNKNFISNEKNNL
YIILNAYGKDTENVEVVKKYSKELYKLSVLKTNKNLGVNVKKLRESAIEYGYCPLPYDKEKEVAKLSSVKHKLYKTYDFVITHY
LNSNDKILLEIVEALRLSKNDDEKENVYKKYAEKLFKADDVINPIKAISKLFVEKGNKLFKEKIIIKKEYIEDVSIDKNIYDFT
KVIFFMTCFLDGKEINDLLTNIISKLQIIEDHNNVIKFISHNKDAVYKDYSDKYAIFRNAGKIATELEAIKSIARMENKIENAS
QEPLLNDALLSLGVSDDTKVLENTYKKYFDSKEKTDKQSQKVSTFLMNNVINNNRFKYVIKYINPADINGLAKNRYLVKFVLSK
IPEEQIDSYYKLFSNEEEPGCEEKIKLLTKKISKLNFQTLFENNKIPNVEKEKKKAIITLYFTIVYILVKNLVNINGLYTLALY
FVERDGYFYKDICGKKDKKKSYNDVDYLLLPEIFSGSKYREETKNLKLPKEKDRDIMKKYLPNDKDREKYNKFFTAYRNNIVHL
NIIAKLSELTKNIDKDINSYFDIYHYCTQRVMFNYCKEKNDVVLAKMKDLAHIKSDCNEFSSKHTYPFSSAVLRFMNLPFAYNV
PRFKNLSYKKFFDKQ (SEQ ID NO: 218)
>OBKG01000025_26
[human gut metagenome]
MAKKNKMKPRELREAQKKARQLKAAEINNNAAPAIAAMPAAEVIAPAAEKKKSSVKAAGMKSILVSENKMYITSFGKGNSAVLE
YEVDNNDYNKTQLSSKDNSNIELGDVDEVNITFSSKHGFGSGVEINTSNPTHRSGESSPVRWDMLGLKSELEKRFFGKTFDDNI
HIQLIYNILDIEKILAVYVTNIVYALNNMLGVKGSESHDDFIGYLSTNNTYDVFIDPDNSSLSDDKKANVRKSLSKFNVLLKTK
RLGYFGLEEPKTKDTRASEAYKKRVYHMLAIVGQIRQCVFHDKSGAKRFDLYSFINNIDPEYRDTLDYLVDERFDSINKGFIQG
NKVNISLLIDMMKGYEADDIIRLYYDFIVLKSQKNLGFSIKKLREKMLEEYGYRFKDKQYDSVRSKMYKLMDFLLFCNYYRNDV
VAGEALVRKLRFSMTDDEKEGIYADEAAKLWGKFRNDFENIADHMNGDVIKELGKADMDFDEKILDSEKKNASDLLYFSKMIYM
LTYFLDGKEINDLLTTLISKFDNIKEFLKIMKSSAVNVECELTAGYKLFNDSQRITNELFIVKNIASMRKPAASAKLTMFRDAL
TILGIDDKITDDRISEILKLKEKGKGIHGLRNFITNNVIESSRFVYLIKYANAQKIREVAKNEKVVMFVLGGIPDTQIERYYKS
CVEFPDMNSSLEVKRSELARMIKNISFDDFKNVKQQAKGRENVAKERAKAVIGLYLTVMYLLVKNLVNVNARYVIAIHCLERDF
GLYKEIIPELASKNLKNDYRILSQTLCELCDNRDESPNLFLKKNKRLRKCVEVDINNADSSMTRKYRNCIAHLTVVRELKEYIG
DIRTVDSYFSIYHYVMQRCITKREDDKKQEEKIKFEDDLLKNHGYTKDFVKALNSPFGYNIPRFKNLSIEQLFDRNEYLTEK
(SEQ ID NO: 219)
>OBKR01000858_3
[human gut metagenome]
MAKKNKMKPRELREAQKKARQLKAAEINNNAAPAIAAMPAAEVIAPAAEKKKSSVKAAGMKSILVSENKMYITSFGKGNSAVLE
YEVDNNDYNKTQLSSKYNSNIELGDVNEVNITFSSKHGFGSGMKINTSNPTHRSGESSPVRWDMLGLKSELEKRFFGKTFDDNI
HIQLIYNILDIEKILAVYVTNIVYALNNMLGVKGSESHDDFIGYLSTNNIYDVFIDPDNSSLSDDKKANVRKSLSKFNVLLKTK
RLGYFGLEEPKTKDNRVSEAYKKRVYHMLAIVGQIRQCVFHDKSGAKRFDLYSFINNIDPEYRDTLDYLVEERLKSINKDFIQG
NKVNISLLIDMMKGYEADDIIRLYYDFIVLKSQKNLGFSIKKLREKMLEEYGFRFKDKQYDSVRSKMYKLMDFLLFCNYYRNDV
VAGEALVRKLRFSMTDDEKEGIYADEAAKLWGKFRNDFENIADHMNGDVIKELGKADMDFDEKILDSEKKNASDLLYFSKMIYM
LTYFLDGKEINDLLTTLISKFDNIKEFLKIMKSSAVDVECELTAGYKLFNDSQRITNELFIVKNIASMRKPAASAKLTMFRDAL
TILGIDDNITDDRISEILKLKEKGKGIHGLRNFITNNVIESSRFVYLIKYANAQKIREVAKNEKVVMFVLGGIPDTQIERYYKS
CVEFPDMNSSLEAKRSELARMIKNISFDDFKNVKQQAKGRENVAKERAKAVIGLYLTVMYLLVKNLVNVNARYVIAIHCLERDF
GLYKEIIPELASKNLKNDYRILSQTLCELCDDRDESPNLFLKKNKRLRKCVEVDINNADSSMTRKYRNCIAHLTVVRELKEYIG
DIRTVDSYFSIYHYVMQRCITKREDDTKQEDKIKYEDDLLKNHGYTKDFVKALNSPFGYNIPRFKNLSIEQLFDRNEYLTEK
(SEQ ID NO: 220)
>OBVH01003037_1
[human gut metagenome]
MAKKKRITAKERKQNHRELLMKKADSNAEKEKAKKPVVENKPDTAISKDNTPKPNKEIKKSKAKLAGVKWVIKANDDVAYISSF
GKGNNSVLEKRIMGDVSSNVNKDSHMYVNPKYTKKNYEIKNGFSSGSSLVTYPNKPDKNSGMDALCLKPYFEKDFFGHIFTDNM
HIQAIYNIFDIEKILAKHITNIIYTVNSFDRNYNQSGNDTIGFGLNYRVPYSEYGGGKDSNGEPKNQSKWEKRDNFIKFYNESK
PHLGYYENIFYDHGEPISEEKFYNYLNILNFIRNNTFHYKDDDIELYSENYSEEFVFINCLNKFVKNKFKNVNKNFISNEKNNL
YIILNAYGKDTENVEVVKKYSKELYKLSVLKTNKNLGVNVKKLRESAIEYGYCPLPYDKEKEVAKLSSVKHKLYKTYDFVITHY
LNSNDKLLLEIVETLRLSKNDDEKENVYKKYAEKLFKADDVINPIKAISKLFARKGNKLFKEKIIIKKEYIEDVSIDKNIYDFT
KVIFFMTCFLDGKEINDLLTNIISKLQVIEDHNNVIKFISNNKDAVYKDYSDKYAIFRNAGKIATELEAIKSIARMENKIENAP
QEPLLKDALLSLGVSDDTKVLENTYNKYFDSKEKTDKQSQKVSTFLMNNVINNNRFKYVIKYINPADINGLAKNRYLVKFVLSK
IPEEQIDSYYKLFSNEEEPGCEEKIKLLTKKISKLNFQTLFENNKIPNVEKEKKKAIITLYFTIVYILVKNLVNINGLYTLALY
FVERDGYFYKDICGKKDKKKSYNDVDYLLLPEIFSGSKYREETKNLKLPKEKDRDIMKKYLPNDKDREKYNKFFTAYRNNIVHL
NIIAKLSELTKNIDKDINSYFDIYHYCTQRVMFNYCKEKNDVVLAKMKDLAHIKSDCNEFSSKHTYPFSSAVLRFMNLPFAYNV
PRFKNLSYKKFFDKQWLKHYENLNDFIRILY (SEQ ID NO: 221)
>OBVH01003037_2
[human gut metagenome]
MAKKKRITAKERKQNHRELLMKKADSNAEKEKAKKPVVENKPDTAISKDNTPKPNKEIKKSKAKLAGVKWVIKANDDVAYISSF
GKGNNSVLEKRIMGDVSSNVNKDSHMYVNPKYTKKNYEIKNGFSSGSSLVTYPNKPDKNSGMDALCLKPYFEKDFFGHIFTDNM
HIQAIYNIFDIEKILAKHITNIIYTVNSFDRNYNQSGNDTIGFGLNYRVPYSEYGGGKDSNGEPKNQSKWEKRDNFIKFYNESK
PHLGYYENIFYDHGEPISEEKFYNYLNILNFIRNNTFHYKDDDIELYSENYSEEFVFINCLNKFVKNKFKNVNKNFISNEKNNL
YIILNAYGKDTENVEVVKKYSKELYKLSVLKTNKNLGVNVKKLRESAIEYGYCPLPYDKEKEVAKLSSVKHKLYKTYDFVITHY
LNSNDKLLLEIVETLRLSKNDDEKENVYKKYAEKLFKADDVINPIKAISKLFARKGNKLFKEKIIIKKEYIEDVSIDKNIYDFT
KVIFFMTCFLDGKEINDLLTNIISKLQVIEDHNNVIKFISNNKDAVYKDYSDKYAIFRNAGKIATELEAIKSIARMENKIENAP
QEPLLKDALLSLGVSDDTKVLENTYNKYFDSKEKTDKQSQKVSTFLMNNVINNNRFKYVIKYINPADINGLAKNRYLVKFVLSK
IPEEQIDSYYKLFSNEEEPGCEEKIKLLTKKISKLNFQTLFENNKIPNVEKEKKKAIITLYFTIVYILVKNLVNINGLYTLALY
FVERDGYFYKDICGKKDKKKSYNDVDYLLLPEIFSGSKYREETKNLKLPKEKDRDIMKKYLPNDKDREKYNKFFTAYRNNIVHL
NIIAKLSELTKNIDKDINSYFDIYHYCTQRVMFNYCKEKNDVVLAKMKDLAHIKSDCNEFSSKHTYPFSSAVLRFMNLPFAYNV
PRFKNLSYKKFFDKQ (SEQ ID NO: 222)
>OBVY01000267_8
[human gut metagenome]
MAKKNKMKPRELREAQKKARQLKAAEINNNAAPAIAAMPAAEVIAPAAEKKKSSVKAAGMKSILVSENKMYITSFGKGNSAVLE
YEVDNNDYNKTQLSSKDNSNIELGDVNEVNITFSSKHGFGSGMKINTSNPTHRSGESSPVRWDMLGLKSELEKRFFGKTFDDNI
HIQLIYNILDIEKILAVYVTNIVYALNNMLGEGDESNYDFMGYLSTFNTYKVFTNPNGSTLSDDKKENIRKSLSKFNALLKTKR
LGYFGLEEPKTKDTRVLEAYKKRVYHMLAIVGQIRQCVFHDLSEHSEYDLYSFIDNSKKVYRECRETLDYLVDERFDSINKGFI
QGNKVNISLLIDMMKGYEADDIIRLYYDFIVLKSQKNLGFSIKKLREKILDEYGFRFKDKQYDSVRSKMYKLMDFLLFCNYYRN
DIAAGESLVRKLRFSMTDDEKEGIYADEAAKLWGKFRNDFENIADHMNGDVIKELGKADMDFDEKILDSEKKNASDLLYFSKMI
YMLTYFLDGKEINDLLTTLISKFDNIKEFLKIMKSSAVDVECELTAGYKLFNDSQRITNELFIVKNIASMRKPAASAKLTMFRD
ALTILGIDDKITDDRISEILKLKEKGKGIHGLRNFITNNVIESSRFVYLIKYANAQKIREVAKNEKVVMFVLGGIPDTQIERYY
KSCVEFPDMNSSLEAKRSELARMIKNIRFDDFKNVKQQAKGRENVAKERAKAVIGLYLTVMYLLVKNLVNVNARYVIAIHCLER
DFGLYKEIIPELASKNLKNDYRILSQTLCELCDNGDESPNLFLKKNKRLRKCVEVDINNADSNMTRKYRNCIAHLTVVRELKEY
IGDIRTVDSYFSIYHYVMQRCITKREDDTKQEEIIKYEDDLLKNHGYTKDFVKALNSPFGYNIPRFKNLSIEQLFDRNEYLTEK
(SEQ ID NO: 223)
>OBXZ01000094_20
[human gut metagenome]
MAKKKRITAKERKQNHRESLMKKADSNAEKEKAKKPVVENKPDTAISKDNIPKPNKEIKKSKAKLAGVKWVIKANDDVAYISSF
GKGNNSVLEKRIMGDVSSNVNKDSHMYVNPKYTKKNYEIKNGFSSGSSLVTYPNKPDKNSGMDALCLKPYFEKDFFGHIFTDNM
HIQAIYNIFDIEKILAKHITNIIYTVNSFDRNYNQSGNDTIGFDINYRVPYSEYGGGKDSNGEPKNKSKWEKRKNFIKFYNKSK
PHLGYYENIFYDHGEPISEEKFYNYLNILNFIRNNTFHYKNDDIELYSENYSEEFVFINCLNKFVKNKFKNVNKNFISNEKNNL
YIILNAYGKDTENVEVVKKYSKELYKLSVLKTNKNLGVNVKKLRESAIEYGYCPLPYDKEKEVAKLSSIKHKLYKTYDFVITHY
LNSNDKLLLEIVEALRLSKNDDEKENVYKKYAEKLFKADDVINPIKAISKLFAEKGNKLFKEMVIIKKEYVEDISIDKNIYDFT
KVIFFMTCFLDGKEINDLLTNIISKLQVIEDHNNVIKFISNNKDAVYKDYSDKYAIFRNAGKIATELEAIKSIVRMENKIENAP
QEPLLKDALLSLGVSDDTKVLENTYKKYFDSKEKADKQSQKVSTFLMNNVINNNRFKYVIKYINPADINGLAKNRYLVKFVLSN
IPEEQIDSYYKLFSNEEEPSCEEKIKLLTKKISKLNFQTLFENNKIPNVEKERKKAIITLYFTIVYILVKNLVNINGLYTLALY
FVERDGYFYKDICGKKDKKKSYNGVDYLLLPEIFSGSKYREQTKNLKLPKEKDRDIMKKYLPNDKDREGYNKFFRAYRNNIVHL
NIIAKLSELTSNIDKDINSYFDIYHYCTQRVMFNYCKENNNIVLAKMKDLAHIKSDCDEFSSKHTYPFSSAVLRFMNLPFAYNV
PRFKNLSYKKFFDKQWLNH (SEQ ID NO: 224)
>OBXZ01000094_20
[human gut metagenome]
MAKKKRITAKERKQNHRESLMKKADSNAEKEKAKKPVVENKPDTAISKDNIPKPNKEIKKSKAKLAGVKWVIKANDDVAYISSF
GKGNNSVLEKRIMGDVSSNVNKDSHMYVNPKYTKKNYEIKNGFSSGSSLVTYPNKPDKNSGMDALCLKPYFEKDFFGHIFTDNM
HIQAIYNIFDIEKILAKHITNIIYTVNSFDRNYNQSGNDTIGFDINYRVPYSEYGGGKDSNGEPKNKSKWEKRKNFIKFYNKSK
PHLGYYENIFYDHGEPISEEKFYNYLNILNFIRNNTFHYKNDDIELYSENYSEEFVFINCLNKFVKNKFKNVNKNFISNEKNNL
YIILNAYGKDTENVEVVKKYSKELYKLSVLKTNKNLGVNVKKLRESAIEYGYCPLPYDKEKEVAKLSSIKHKLYKTYDFVITHY
LNSNDKLLLEIVEALRLSKNDDEKENVYKKYAEKLFKADDVINPIKAISKLFAEKGNKLFKEMVIIKKEYVEDISIDKNIYDFT
KVIFFMTCFLDGKEINDLLTNIISKLQVIEDHNNVIKFISNNKDAVYKDYSDKYAIFRNAGKIATELEAIKSIVRMENKIENAP
QEPLLKDALLSLGVSDDTKVLENTYKKYFDSKEKADKQSQKVSTFLMNNVINNNRFKYVIKYINPADINGLAKNRYLVKFVLSN
IPEEQIDSYYKLFSNEEEPSCEEKIKLLTKKISKLNFQTLFENNKIPNVEKERKKAIITLYFTIVYILVKNLVNINGLYTLALY
FVERDGYFYKDICGKKDKKKSYNGVDYLLLPEIFSGSKYREQTKNLKLPKEKDRDIMKKYLPNDKDREGYNKFFRAYRNNIVHL
NIIAKLSELTSNIDKDINSYFDIYHYCTQRVMFNYCKENNNIVLAKMKDLAHIKSDCDEFSSKHTYPFSSAVLRFMNLPFAYNV
PRFKNLSYKKFFDKQ (SEQ ID NO: 225)
>OCHB01002119_1
[human gut metagenome]
MAKKNKMKPRELREAQKKARQLKAAEINNNAAPAIAAMPAAQVIAPAAEKKKSSVKAAGMKSILVSENKMYITSFGKGNSAVLE
YEVDKVDNNNYNKTQLSSKDNSNIELGDVNEVNITFSSKHGFESGVEINTSNPTHRSGESSPVRWDMLGLKSELEKRFFGKTFD
DNIHIQLIYNILDIEKILAVYVTNIVYALNNMLGIKGSESYDDFMGYLSARNTYEVFTHPDKSNLSDKVKGNIKKSLSKFNDLL
KTKRLGYFGLEEPKTKDTRVSQAYKKRVYHMLAIVGQIRQSVFHDKSSKLDEDLYSFIDIIDSEYRETLDYLVDERFDSINKGF
IQGNKVNISLLIDMMKGYEADDIIRLYYDFIVLKSQKNLGFSIKKLREKMLDEYGFRFKDKQYDSVRSKMYKLMDFLLFCNYYR
NDVVAGEALVRKLRFSMTDDEKEGIYADEASKLWGKFRNDFENIADHMNGDVIKELGKADMDFDEKILDSEKKNASDLLYFSKM
IYMLTYFLDGKEINDLLTTLISKFDNIKEFLKIMKSSAVDVECELTAGYKLFNDSQRITNELFIVKNIASMRKPASSAKLTMFR
DALTILGIDDNITDDRISEILKLKEKGKGIHGLRNFITNNVIESSRFVYLIKYANAQKIREVAKNEKVVMFVLGGIPDTQIERY
YKSCVEFPDMNSSLEAKRSELARMIKNIRFDDFKNVKQQAKGRENVAKERAKAVIGLYLTVMYLLVKNLVNVNARYVIAIHCLE
RDFGLYKEIIPELASKNLKNDYRILSQTLCELCDDRDESPNLFLKKNKRLRKCVEVDINNADSSMTRKYRNCIAHLTVVRELKE
YIGDIRTVDSYFSIYHYVMQRCITKREDDTKQEEKIKYEDDLLKNHGYTKDFVKALNSPFGYNIPRFKNLSIEQLFDRNEYLTE
K (SEQ ID NO: 226)
>OCHC01000012_250
[human gut metagenome]
MAKKNKMKPRELREAQKKARQFKAAEINNNAVPAIAAMPAAEAAAPAAEKKKSSVKAAGMKSILVSENKMYITSFGKGNSAVLE
YEVDNNDYNKTQLSSEDSSNIELCGVNEVNITFSSKHGFESGVEINTSNPTHRSGESSPVRGDMLGLKSELEKRFFGKTFDDNI
HIQLIYNILDIEKILAVYVTNIVYALNNMLGVKGSESHDDFIGYLSTNNIYDVFIDPDNSSLSDDKKANVRKSLSKFNALLKTK
RLGYFGLEEPKTKDTRASEAYKKRVYHMLAIVGQIRQCVFHDKSGAKRFDLYSFINNIDPEYRDTLDYLVDERFDSINKGFIQG
NKVNISLLIDMMKGYEADDIIRLYYDFIVLKSQKNLGFSIKKLREKMLEEYGYRFKDKQYDSVRSKMYKLMDFLLFCNYYRNDV
VAGEALVRKLRFSMTDDEKEGIYADEAAKLWGKFRNDFENIADHMNGDVIKELGKADMDFDEKILDSEKKNASDLLYFSKMIYM
LTYFLDGKEINDLLTTLISKFDNIKEFLKIMKSSAVDVECELTAGYKLFNDSQRITNELFIVKNIASMRKPAASAKLTMFRDAL
TILGIDDKITDDRISEILKLKEKGKGIHGLRNFITNNVIESSRFVYLIKYANAQKIREVAKNEKVVMFVLGGIPDTQIERYYKS
CVEFPDMNSSLGVKRSELARMIKNISFDDFKNVKQQAKGRENVAKERAKAVIGLYLTVMYLLVKNLVNVNARYVIAIHCLERDF
GLYKEIIPELASKNLKNDYRILSQTLCELCDKSPNLFLKKNERLRKCVEVDINNADSSMTRKYRNCIAHLTVVRELKEYIGDIR
TVDSYFSIYHYVMQRCITKREDDIKQEEKIKYEDDLLKNHGYTKDFVKALNSPFGYNIPRFKNLSIEQLFDRNEYLTEK (SEQ
ID NO: 227)
>OCHN01000290_35
[human gut metagenome]
MLCLKPTLEKKFFGKEFNDNIHIQLIYNILDIEKILAVYSTNAIYALNNMSADENIENSDFFMKRTTDETFDDFEKKKESTNSR
EKADFDAFEKFIGNYRLAYFADAFYVDKNKSKSKPKDKAKGIQRGEKEIYSILALIAKLRHWCVHSEEGRAEFWLYKLDELKSD
FKNVLDVVYNRPVEKINNRFIENNKVNIQILGSVYKNTDIAELVRSYYEFLITKKYKNMGFSIKKLRESMLEGKGYADKEYDSV
RNKLYQMTDFILYTGYINEDSDRADDLVNTLRSSLKEDDKTTVYCKEADYLWKKYRESIREVAASLDVKNINELKNNAFTIPDN
ELRKCFISYADSVSEFTKLIYLLTRFLSGKEINDLVTTLINKFDNIRSFLEVMDELGLERTFTDEYSFFEGSTKYLAELVELNS
FVKSCSFDINAKRTMYRDALDILGIESGKTEEDIEKMIDNIVQFDANGKKLPNKNHGLRNFIASNVIDSNRFEYLVRYGNPKKI
RETAKCKPAVRFVLNEIPDAQIERYYKACYPDEKSLCFANMQRDKLAGVIANIKFDDFSDAGSYQKANATSTKITSEAEIKRKN
QAIIRLYLTVMYIMLKNLVNVNARYVIAFHCVERDTKLYAESGLEVGNIEKNKTNLTMAVMGVKLENGIIKTEFDKSLAENAAN
RYFRNARWYKLILDNLKKSERAVVNEFRNTVCHLNAIRNININIKEIKEVENYFALYHYLIQKHLEKRFADNGGSTGDFISKLE
EHKTYCKDFVKAYCTPFGYNLVRYKNLTIDGLFDKNYPGKDDSDKQK (SEQ ID NO: 228)
>OCPQ01000020_138
[human gut metagenome]
MAKKNKMKPRELREAQKKARQLKAAEINNNAVPAIAAMPAAEAAAPAAEKKKSSVKAAGMKSILVSENKMYITSFGKGNSAVLE
YEVDNNDYNKTQLSSKDNSNIELCDVNEVNITFSSKHGFESGVEINTSNPTHRSGESSPVRWDMLGLKSELEKRFFGKTFDDNI
HIQLIYNILDIEKILAVYITNIVYALNNMLGVKGSESHDDFIGYLSTNNIYDVFIDPDNSSLSDDKKANVRKSLSKFNALLKTK
RLGYFGLEEPKTKDNRVSEAYKKRVYHMLAIVGQIRQSVFHDKSSKLHEDLYSFIDIIDSEYRETLDYLVDERFDSINKGFIQG
NKVNISLLIDMMKGYEADDIIRLYYDFIVIKSQKNLGFSIKKLREKMLDEYGFRFKDKQYDSVRSKMYKLMDFLLFCNYYRNDV
VAGEALVRKLRFSMTDDEKEGIYADEAEKLWGKFRNDFENIADHMNGDVIKELGKADMDFDEKILDSEKKNASDLLYFSKMIYM
LTYFLDGKEINDLLTTLISKFDNIKEFLKIMKSSAVNVECELTAGYKLFNDSQRITNELFIVKNIASMRKPAASAKLTMFRDAL
TILGIDDKITDDRISEILKLKEKGKGIHGLRNFITNNVIESSRFVYLIKYANAQKIREVAKNEKVVMFVLGGIPDTQIERYYKS
CVEFPDMNSPLEAKRSELARMIKNIRFDDFKNVKQQAKGRENVAKERAKAVIGLYLTVMYLLVKNLVNVNARYVIAIHCLERDF
GLYKEIIPELASKNLKNDYRILSQTLCELCDKSPNLFLKKNERLRKCVEVDINNADSSMTRKYRNCIAHLTVVRELKEYIGDIR
TVDSYFSIYHYVMQRCITKREDDIKQEEKIKYEDDLLKNHGYTKDFVKALNSPFGYNIPRFKNLSIEQLFDRNEYLTEK (SEQ
ID NO: 229)
>OCPU01001206_17
[human gut metagenome]
MAKKNKMKPRELREAQKKARQFKAAEINNNAVPAIAAMPAAEAAAPAAEKKKSSVKAAGMKSILVSENKMYITSFGKGNSAVLE
YEVDNNDYNKTQLSSEDSSNIELCGVNEVNITFSSKHGFESGVEINTSNPTHRSGESSPVRGDMLGLKSELEKRFFGKTFDDNI
HIQLIYNILDIEKILAVYVTNIVYALNNMLGVKGSESHDDFIGYLSTNNIYDVFIDPDNSSLSDDKKANVRKSLSKFNALLKTK
RLGYFGLEEPKTKDTRASEAYKKRVYHMLAIVGQIRQCVFHDKSGAKRFDLYSFINNIDPEYRDTLDYLVDERFDSINKGFIQG
NKVNISLLIDMMKGYEADDIIRLYYDFIVLKSQKNLGFSIKKLREKMLEEYGYRFKDKQYDSVRSKMYKLMDFLLFCNYYRNDV
VAGEALVRKLRFSMTDDEKEGIYADEAAKLWGKFRNDFENIADHMNGDVIKELGKADMDFDEKILDSEKKNASDLLYFSKMIYM
LTYFLDGKEINDLLTTLISKFDNIKEFLKIMKSSAVDVECELTAGYKLFNDSQRITNELFIVKNIASMRKPAASAKLTMFRDAL
TILGIDDKITDDRISEILKLKEKGKGIHGLRNFITNNVIESSRFVYLIKYANAQKIREVAKNEKVVMFVLGGIPDTQIERYYKS
CVEFPDMNSSLGVKRSELARMIKNISFDDFKNVKQQAKGRENVAKERAKAVIGLYLTVMYLLVKNLVNVNARYVIAIHCLERDF
GLYKEIIPELASKNLKNDYRILSQTLCELCDKSPNLFCASALKSILIMQTAA (SEQ ID NO: 230)
>OFMU01000310_31
[human gut metagenome]
MAKKNKMKPRELREAQKKARQLKAAEINNNAAPAIAAMPAAEAAAPAAEKKKSSVKAAGMKSILVSENKMYITSFGKGNSAVLE
YEVDNNDYNQTQLSSKGSSNIELHGVNEVNITFSSKHGFESGVEINTSNPTHRSGESSPVRWDMLGLKSELEKRFFGKTFDDNI
HIQLIYNILDIEKILAVYVTNIVYALNNMLGVKGSESHDDFIGYLSTNNTYDVFIDPDNSSLSDDKKANVRKSLSKFNVLLKTK
RLGYFGLEEPKTKDTRVSQAYKKRVYHMLAIVGQIRQCVFHDKSGAKRFDLYSFINNIDPEYRETLDYLVDERFDSINKGFIEG
NKINISLLIDMMKGYEADDIIRLYYDFIVLKSQKNLGFSIKKLREKMLDEYGFRFKDKQYDPVRSKMYKLMDFLLFCNHYRNDV
AAGEALVRKLRFSMTDDEKEGIYADEAAKLWGKFRNDFENIADHMNGDVIKELGKADMDFDEKILDSEKKNASDLLYFSKMIYM
LTYFLDGKEINDLLTTLISKFDNIKEFLKIMKSSAVDVECELTAGYKLFNDSQRITNELFIVKNIASMRKPAASAKLTMFRDAL
TILGIDDNITDDRISEILKLKEKGKGIHGLRNFITNNVIESSRFVYLIKYANAQKIREVAKNEKVVMFVLGGIPDTQIERYYKS
CVEFPDMNSSLEAKRSELARMIKNISFDDFKNVKQQAKGRENVAKERAKAVIGLYLTVMYLLVKNLVNVNARYVIAIHCLERDF
GLYKEIIPELASKNLKNDYRILSQTLCELCDDRDESPNLFLKKNKRLRKCVEVDINNADSSMTRKYRNCIAHLTVVRELKEYIG
DIRTVDSYFSIYHYVMQRCITKRENDTKQEEKIKYEDDLLKNHGYTKDFVKALNSPFGYNIPRFKNLSIEQLFDRNEYLTEK
(SEQ ID NO: 231)
>OFMV01000268_25
[human gut metagenome]
MAKKNKMKPRELREAQKKARQFKAAEINNNAAPAIAAMPAAEVIAPVAEKKKSSVKAAGMKSILVSENKMYITSFGKGNSAVLE
YEVDNNDYNKTQLSSKDNSNIELCGVNEVNITFSSKHGFESGVEINTSNPTHRSGESSPVRWDMLGLKSELEKRFFGKTFDDNI
HIQLIYNILDIEKILAVYVTNIVYALNNMLGEGDESNYDFMGYLSTFNTYKVFTNPNGSTLSDDKKENIRKSLSKFNALLKTKR
LGYFGLEEPKTKDTRVLEAYKKRVYHMLAIVGQIRQCVFHDLSEHSEYDLYSFIDNSKKVYRECRETLDYLVDERFDSINKGFI
QGNKVNISLLIDMMKGYEADDIIRLYYDFIVLKSQKNLGFSIKKLREKILDEYGFRFKDKQYDSVRSKMYKLMDFLLFCNYYRN
DIAAGESLVRKLRFSMTDDEKEGIYADEAAKLWGKFRNDFENIADHMNGDVIKELGKADMDFDEKILDSEKKNASDLLYFSKMI
YMLTYFLDGKEINDLLTTLISKFDNIKEFLKIMKSSAIDVECELTAGYKLFNDSQRITNELFIVKNIASMRKPAASAKLTMFRD
ALTILGIDDKITDDRISEILKLKEKGKGIHGLRNFITNNVIESSRFVYLIKYANAQKIREVAKNEKVVMFVLGGIPDTQIERYY
KSCVEFPDMNSSLEAKRSELARMIKNIRFDDFKNVKQQAKGRENVAKERAKAVIGLYLTVMYLLVKNLVNVNARYVIAIHCLER
DFGLYKEIIPELASKNLKNDYRILSQTLCELCDNGDESPNLFLKKNKRLRKCVEVDINNADSSMTRKYRNCIAHLTVVRELKEY
IGDIRTVDSYFSIYHYVMQRCITKREDDTKQEEKIKYEDDLLKNHGYTKDFVKALNSPFGYNIPRFKNLSIEQLFDRNEYLTEK
(SEQ ID NO: 232)
>OGCM01002738_3
[human gut metagenome]
MAKKNKMKPRELREAQKKARQLKAAEINNNAAPAIAAMPAAQVIAPAAEKKKSSVKAAGMKSILVSENKMYITSFGKGNSAVLE
YEVDNNDYNQTQLSSDGSSNIELRGVNEVNITFSSKHGFESGVEINTSNPTHRSGESSPVRGDMLGLKSELEKRFFGKTFDDNI
HIQLIYNILDIEKILAVYVTNIVYALNNMLGVKGSESYDDFMGYLSAQNTYYIFTHPDKSNLSDKVKGNIKKSLSKFNDLLKTK
RLGYFGLEEPKTKDKRVSEAYKKRVYHMLAIVGQIRQSVFHDKSNELDEYLYSFIDIIDSEYRDTLDYLVDERFDSINKGFVQG
NKVNISLLIDMMKGYEADDIIRLYYDFIVLKSQKNLGFSIKKLREKMLDEYGFRFKDKQYDSVRSKMYKLMDFLLFCNYYRNDV
VAGEALVRKLRFSMTDDEKEGIYADEAEKLWGKFRNDFENIADHMNGDVIKELGKADMDFDEKILDSEKKNASDLLYFSKMIYM
LTYFLDGKEINDLLTTLISKFDNIKEFLKIMKSSAVDVECELTAGYKLFNDSQRITNELFIVKNIASMRKPAASAKLTMFRDAL
TILGIDDKITDDRISEILKLKEKGKGIHGLRNFITNNVIESSRFVYLIKYANAQKIREVAENEKVVMFVLGGIPDTQIERYYKS
CVEFPDMNSPLEAKRSELARMIKNIRFDDFKNVKQQAKGRENVAKERAKAVIGLYLTVMYLLVKNLVNVNARYVIAIHCLERDF
GLYKEIIPELASKNLKNDYRILSQTLCELCDKSPNLFLKKNERLRKCVEVDINNADSSMTRKYRNCIAHLTVVRELKEYIGDIR
TVDSYFSIYHYVMQRCITKREDDTKQEEKIKYEDDLLKNHGYTKDFVKALNSPFGYNIPRFKNLSIEQLFDRNEYLTEK (SEQ
ID NO: 233)
>OGCO01000353_15
[human gut metagenome]
MAKKNKMKPRELREAQKKARQLKAAEINNNAAPAIAAMPAAQVIAPAAEKKKSSVKAAGMKSILVSENKMYITSFGKGNSAVLE
YEVDKVDNNNYNKTQLSSKDNSNIELGDVNEVNITFSSKHGFESGVEINTSNPTHRSGESSPVRWDMLGLKSELEKRFFGKTFD
DNIHIQLIYNILDIEKILAVYVTNIVYALNNMLGVKGSESHDDFIGYLSTNNTYDVFIDPDNSSLSDDKKANVRKSLSKFNVLL
KTKRLGYFGLEEPKTKDNRVSEAYKKRVYHMLAIVGQIRQCVFHDKSGAKRFDLYSFINNIDPEYRDTLDYLVEERLKSINKDF
IQGNKVNISLLIDMMKGYEADDIIRLYYDFIVLKSQKNLGFSIKKLREKMLEEYGFRFKDKQYDSVRSKMYKLMDFLLFCNYYR
NDIAAGEALVRKLRFSMTDDEKEGLYADEAAKLWGKFRNDFENIADHMNGDVIKELGKADMDFDEKILDSEKKNASDLLYFSKM
IYMLTYFLDGKEINDLLTTLISKFDNIKEFLKIMKSSAVNVECELTAGYKLFNDSQRITNELFIVKNIASMRKPAASAKLTMFR
DALTILGIDDKITDDRISEILKLKEKGKGIHGLRNFITNNVIESSRFVYLIKYANAQKIRKVAENEKVVMFVLGGIPDTQIERY
YKSCVEFPDMNSSLEVKRSELARMIKNISFDDFKNVKQQAKGRENVAKERAKAVIGLYLTVMYLLVKNLVNVNARYVIAIHCLE
RDFGLYKEIIPELASKNLKNDYRILSQTLCELCDKSPNLFLKKNERLRKCVEVDINNADSSMTRKYRNCIAHLTVVRELKEYIG
DIRTVDSYFSIYHYVMQRCITKREDDKKQEEKIKFEDDLLKNHGYTKDFVKALNSPFGYNIPRFKNLSIEQLFDRNEYLTEK
(SEQ ID NO: 234)
>OGOK01000323_15
[human gut metagenome]
MAKKNKMKPRELREAQKKARQLKAAEINNNAVPAIAAMPAAEAAAPAAEKKKSSVKAAGMKSILVSENKMYITSFGKGNSAVLE
YEVDNNDYNKTQLSSKDNSNIELCDVGKVNITFSSRRGFESGVEINTSNPTHRSGESSSVRGDMLGLKSELEKRFFGKNFDDNI
HIQLIYNILDIEKILAVYVTNIVYALNNMLGEGDESNYDFMGYLSTFNTYKVFTNPNGSTLSDDKKENIRKSLSKFNALLKTKR
LGYFGLEEPKTKDTRASEAYKKRVYHMLAIVGQIRQCVFHDKSGAKRFDLYSFINNIDPEYRETLDYLVDERFDSINKGFIQGN
KVNISLLIDMMKGYEADDIIRLYYDFIVLKSQKNLGFSIKKLREKMLDEYGFRFKDKQYDSVRSKMYKLMDFLLFCNYYRNDIA
AGESLVRKLRFSMTDDEKEGIYADEAAKLWGKFRNDFENIADHMNGDVIKELGKADMDFDEKILDSEKKNASDLLYFSKMIYML
TYFLDGKEINDLLTTLISKFDNIKEFLKIMKSSAVDVECELTAGYKLFNDSQRITNELFIVKNIASMRKPAASAKLTMFRDALT
ILGIDDKITDDRISEILKLKEKGKGIHGLRNFVTNNVIESSRFVYLIKYANAQKIREVAKNEKVVMFVLGGIPDTQIERYYKSC
VEFPDMNSSLEAKRSELARMIKNIRFDDFKNVKQQAKGRENVAKERAKAVIGLYLTVMYLLVKNLVNVNARYVIAIHCLERDFG
LYKEIIPELASKNLKNDYRILSQTLCELCDNPDESPNLFLKKNRRLRKCVEVDINNADSSMTRKYRNCIAHLTVVRELKEYIGD
ICTVDSYFSIYHYVMQRCITKRENDTKQEEKIKYEDDLLKNHGYTKDFVKALNSPFGYNIPRFKNLSIEQLFDRNEYLTEK
(SEQ ID NO: 235)
>OGOL01000786_27
[human gut metagenome]
MAKKNKMKPRELREAQKKARQLKAAEINNNAVPAIAAMPAAEVIAPAAEKKKSSVKAAGMKSILVSENKMYITSFGKGNSAVLE
YEVDNNDYNKTQLSSKDNSNIELGNVNEVNITFSSRRGFESGVEINTSNPTHRSGESSPVRGDMLGLKSELEKRFFGKTFDDNI
HIQLIYNILDIEKILAVYVTNIVYALNNMLGEDDDESHDDFMGYLSAKNTYDVFTDPDESDLSKNIKGNIKKSLSKFNDLLKTK
RLGYFGLEEPKTKDTNALEAYKKRVYHMLAIVGQIRQSVFHDKSSKLDEDLYSFIDIIDSEYRETLDYLVDERFDSINKGFIQG
NKVNISLLIDMMKGYEADDIIRLYYDFIVLKSQKNLGFSIKKLREKMLEEYGFRFKDKQYDSVRSKMYKLMDFLLFCNYYRNDV
AAGEALVRKLRFSMTDDEKEGIYADEAEKLWGKFRNDFENIADHMNGDVIKELGKADMDFDEKILDSEKKNASDLLYFSKMIYM
LTYFLDGKEINDLLTTLISKFDNIKEFLKIMKSSAVDVECELTAGYKLFNDSQRITNELFIVKNIASMRKPAASAKLTMFRDAL
TILGIDDKITDDRISEILKLKEKGKGIHGLRNFITNNVIESSRFVYLIKYANAQKIRKVAENEKVVMFVLGGIPDTQIERYYKS
CVEFPDMNSSLEAKYSELARMIKNISFDDFKNVKQQAKGRENVAKERAKAVIGLYLTVMYLLVKNLVNVNARYVIAIHCLERDF
GLYKEIIPELASKNLKNDYRILSQTLCELCDDRDESPNLFLKKNRRLRKCVEVDINNADSSMTRKYRNCIAHLTVVRELKEYIG
DIRTVDSYFSIYHYVMQRCITKREDDTKQEDKIKYEDDLLKNHGYTKDFVKALNSPFGYNIPRFKNLSIEQLFDRNEYLTEK
(SEQ ID NO: 236)
>OGOO01001137_18
[human gut metagenome]
MAKKNKMKPRELREAQKKARQLKAVEINNNAVPEIAAMPAAEVIAPVAEKKKSSVKAAGMKSILVSENKMYITSFGKGNSAVLE
YEVDNNDYNKTQLSSKNSSNIELRGVNEVNITFSSKHGFESGVEINTSNPTHRSGESSPVRWDMLGLKSELEKRFFGKTFDDNI
HIQLIYNILDIEKILAVYVTNIVYALNNMLGIKGSESYDDFMGYLSARNTYEVFTHPDKSSLSDDKKANVRKSLSKFNVLLKTK
RLGYFGLEEPKTKDTRVSQAYKKRVYHMLAIVGQIRQSVFHDKSSKLHEDLYSFIDIIDSEYRETLDYLVDERFDSINKGFIQG
NKVNISLLIDMMKDDYEADDIIRLYYDFIVLKSQKNLGFSIKKLREKMLDEYGFRFKDKQYDSVRSKMYKLMDFLLFCNYYRND
VIAGEALVRKLRFSMTDDEKEGIYADEAAKLWGKFRNDFENIADHMNGDVIKELGKADMDFDEKILDSEKKNASDLLYFSKMIY
MLTYFLDGKEINDLLTTLISKFDNIKEFLKIMKSSAVDVECELTAGYKLFNDSQRITNELFIVKNIASMRKPAASAKLTMFRDA
LTILGIDDKITDDRISEILKLKEKGKGIHGLRNFITNNVIESSRFVYLIKYANAQKIREVAENEKVVMFVLGGIPDTQIERYYK
SCVEFPDMNSPLEAKRSELARMIKNIRFDDFKNVKQQAKGRENVAKERAKAVIGLYLTVMYLLVKNLVNVNARYVIAIHCLERD
FGLYKEIIPELASKNLKNDYRILSQTLCELCDKSPNLFLKKNERLRKCVEVDINNADSSMTRKYRNCIAHLTVVRELKEYIGDI
RTVDSYFSIYHYVMQRCITKREDDIKQEEKIKYEDDLLKNHGYTKDFVKALNSPFGYNIPRFKNLSIEQLFDRNEYLTEK
(SEQ ID NO: 237)
>OGOP01001824_10
[human gut metagenome]
MAKKNKMKPRELREAQKKARQLKAAEINNNAVPAIAAMPAAEAAAPAAEKKKSSVKAAGMKSILVSENKMYITSFGKGNSAVLE
YEVDNNDYNKTQLSSKDNSNIELCDVDEVNITFSSKHGFESGVKINTSNPTHRSGESSSVRGDMLGLKSELEKRFFGKTFDDNI
HIQLIYNILDIEKILAVYVTNIVYALNNMLGLENESNNDFMGYLSAKNTYDVFTDPDESDLSKNIKGNIKKSLSKFNDLLKTKR
LGYFGLEEPKTKDKRVSEAYKKRVYHMLAIVGQIRQSVFHDKSNELDEYLYSFIDIIDSEYRETLDYLIDERFDSINKGFIQGN
KVNISLLIDMMKGYEADDIIRLYYDFIVLKSQKNLGFSIKKLREKMLDEYGFRFKDKQYDSVRSKMYKLMDFLLFCNYHRKDVV
AGEALVRKLRFSMTDEEKEGIYADEAAKLWGKFRNDFENIADHMNGDVIKELGKADMDFDEKILDSEKKNASDLLYFSKMIYML
TYFLDGKEINDLLTTLISKFDNIKEFLKIMKSSAVNVECELTTGYKLFNDSQRITNELFIVKNIASMRKPAASAKLTMFRDALT
ILGIEDNITDDRISEILKLKEKGKGIHGLRNFITNNVIESSRFVYLIKYANAQKIREVAENEKVVMFVLGGIPDTQIERYYKSC
VEFPDMNSSMGAKRRELAKMIKSISFENFKDVKQQAKGRENVAKERAKAVIGLYLTVMYLLVKNLVNVNARYVIAIHCLERDFG
LYKEIIPELASKNLKNDYRILSQTLCELCDNGDESPNLFLKKNKRLRKCVEVDINNADSNMTRKYRNCIAHLTVVRELKEYIGD
IYAVDSYFSIYHYVMQRCITKRENDTEQAEKIKYEDDLFKNHGYTRDFVKALNSPFGYNIPRFKNLSIKQMFDRNEYLTEK
(SEQ ID NO: 238)
>OGPB01000314_7
[human gut metagenome]
MAKKNKMKPRELREAQKKARQFKAAEINNNAVPAIAAMPAAEAAAPAAEKKKSSVKAAGMKSILVSENKMYITSFGKGNSAVLE
YEVDNNDYNKTQLSSEDSSNIELCGVNEVNITFSSKHGFESGVEINTSNPTHRSGESSPVRGDMLGLKSELEKRFFGKTFDDNI
HIQLIYNILDIEKILAVYVTNIVYALNNMLGVKGSESHDDFIGYLSTNNIYDVFIDPDNSSLSDDKKANVRKSLSKFNALLKTK
RLGYFGLEEPKTKDTRASEAYKKRVYHMLAIVGQIRQCVFHDKSGAKRFDLYSFINNIDPEYRDTLDYLVDERFDSINKGFIQG
NKVNISLLIDMMKGYEADDIIRLYYDFIVLKSQKNLGFSIKKLREKMLEEYGYRFKDKQYDSVRSKMYKLMDFLLFCNYYRNDV
VAGEALVRKLRFSMTDDEKEGIYADEAAKLWGKFRNDFENIADHMNGDVIKELGKADMDFDEKILDSEKKNASDLLYFSKMIYM
LTYFLDGKEINDLLTTLISKFDNIKEFLKIMKSSAVNVECELTAGYKLFNDSQRITNELFIVKNIASMRKPAASAKLTMFRDAL
TILGIDDKITDDRISEILKLKEKGKGIHGLRNFITNNVIESSRFVYLIKYANAQKIREVAKNEKVVMFVLGGIPDTQIERYYKS
CVEFPDMNSSLEVKRSELARMIKNIRFDDFKNVKQQAKGRENVAKERAKAVIGLYLTVMYLLVKNLVNVNARYVIAIHCLERDF
GLYKEIIPELASKNLKNDYRILSQTLCELCDDRDESPNLFLKKNKRLRKCVEVDINNADSSMTRKYRNCIAHLTVVRELKKYIG
DIRTVDSYFSIYHYVMQRCITKREDDTKQEEKIKYEDDLLKNHGYTKDFVKALNSPFGYNIPRFKNLSIEQLFDRNEYLTEK
(SEQ ID NO: 239)
>OGPJ01000449_26
[human gut metagenome]
MAKKNKMKPRELREAQKKARQLKAAEINNNAVPAIAAMPAAEVIAPAAEKKKSSVKAAGMKSILVSENKMYITSFGKGNSAVLE
YEVDNNDYNQTQLSSDGSSNIELRGVNEVNITFSSKHGFESGVEINTSNPTHRSGESSPVRWDMLGLKSELEKRFFGKTFDDNI
HIQLIYNILDIEKILAVYVTNIVYALNNMLGEGDDESHDDFMGYLSAKNTYDVFTDPDESDLSKNIKGNIKKSLSKFNDLLKTK
RLGYFGLEEPKTKDTNALEAYKKRVYHMLAIVGQIRQSVFHDKSSKLDEDLYSFIDIIDSEYRETLDYLVDERFDSINKGFIQG
NKVNISLLIDMMKGYEADDIIRLYYDFIVLKSQKNLGFSIKKLREKMLEEYGYRFKDKQYDSVRSKMYKLMDFLLFCNYYRNDV
VAGEALVRKLRFSMTDDEKEGIYADEAAKLWGKFRNDFENIADHMNGDVIKELGKADMDFDEKILDSEKKNASDLLYFSKMIYM
LTYFLDGKEINDLLTTLISKFDNIKEFLKIMKSSAVDVECELTAGYKLFNDSQRITNELFIVKNIASMRKPAASAKLTMFRDAL
TILGIDDKITDDRISEILKLKEKGKGIHGLRNFITNNVIESSRFVYLIKYANAQKIREVAENEKVVMFVLGGIPDTQIERYYKS
CVEFPDMNSPLEAKRSELARMIKNIRFDDFKNVKQQAKGRENVAKERAKAVIGLYLTVMYLLVKNLVNVNARYVIAIHCLERDF
GLYKEIIPELASKNLKNDYRILSQTLCELCDKSPNLFLKKNERLRKCVEVDINNADSSMTRKYRNCIAHLTVVRELKEYIGDIR
TVDSYFSIYHYVMQRCITKREDDIKQEEKIKYEDDLLKNHGYTKDFVKALNSPFGYNIPRFKNLSIEQLFDRNEYLTEK (SEQ
ID NO: 240)
>OGPS01000624_23
[human gut metagenome]
MGKKIHARDLREQRKTDRTEKFADQNKKREAERAVQKKDAAVSVKSVSSVSSKKDNVTKSMAKAAGVKSVFAVENTVYMTSFGR
GNDAVLEQKIVDTSHEQLNIDDPAYQLNVVTMNGYSVTGHRGETVSAVTDNPLRRFNGGKKDEPEQSVPTDMLCLKPTLEKKFF
GKEFNDNIHIQLIYNILDIEKILAVYSTNAIYALNNMSADENIENSDFFMKRTTDETFDDFEKKKESTNSREKADFDAFEKFIG
NYRLAYFADAFYVNKKNPKGKARNVLREDKELYSVLTLIGKLRHWCVHSEEGRAEFWLYKLNELKDDFKNVLDVVYNRPVEEIN
NRFIENNKVNIQILGSVYKNTDIAELVRSYYEFLITKKYKNMGFSIKKLRESMLEGKGYADKEYDSVRNKLYQMTDFILYTGYI
NEDSDRADDLVNTLRSSLKEDDKTTVYCKEADYLWKKYRESIREVADALDGDNIKRLSKSNIEIQEDKLRKCFISYADSVSEFT
KLIYLLTRFLSGKEINDLVTTLINKFDNIRSFLEIMDELGLDRTFTAEYSFFEDSTKYLAELVELNSFVKSCSFDINAKRTMYR
DALDILGIKSGKTEEDIEKMIDNILQIDANGDKKLKKNNGLRNFIASNVIDSNRFKYLVRYGNPKKIRETAKCKPAVRFVLNEI
PDAQIERYYEACCPENTALCSANKKREKLADMIAEIEFENFSDAGNYQKANVTSKTHEAEIKRKNQSIIRLYLTVMYIMLKNLV
NVNARYVIAFHCVERDTKLYAESGLEVGNIEKNKTNLTMAVMGVKLENGIIKTEFDKSFAENAANRYLRNARWYKLILDNLKKS
ERAVVNEFRNTVCHLNAIRNININIDGIKEVENYFALYHYLIQKHLENRFADKKVERDTGDFISKLEEHKTYCKDFVKAYCTPF
GYNLVRYKNLTIDGLFDKNYPGKDDSDKQK (SEQ ID NO: 241)
>OGQH01000331_48
[human gut metagenome]
MAKKNKMKPRELREAQKKARQLKAAEINNNAAPAIAAMPAAEVIAPAAEKKKSSVKAAGMKSILVSKNKMYITSFGKGNSAVLE
YEVDNNDYNQTQLSSKNSSNIELHGVNEVNITFSSKHGFESGVEINTSNPTHRSGESSPVRGDMLGLKSELEKRFFGKTFDDNI
HIQLIYNILDIEKILAVYVTNIVYALNNMLGEGDDESHDDFMGYLSAKNTYDVFTDPDESDLSKNIKGNIKKSLSKFNDLLKTK
RLGYFGLEEPKTKDTNALEAYKKRVYHMLAIVGQIRQSVFHDKSSKLDEDLYSFIDIIDSEYRETLDYLVDERFDSINKGFIQG
NKVNISLLIDMMKGYEADDIIRLYYDFIVLKSQKNLGFSIKKLREKMLEEYGYRFKDKQYDSVRSKMYKLMDFLLFCNYYRNDV
VAGEALVRKLRFSMTDDEKEGIYADEAAKLWGKFRNDFENIADHMNGDVIKELGKADMDFDEKILDSEKKNASDLLYFSKMIYM
LTYFLDGKEINDLLTTLISKFDNIKEFLKIMKSSAVDVECELTAGYKLFNDSQRITNELFIVKNIASMRKPAASAKLTMFRDAL
TILGIDDKITDDRISEILKLKEKGKGIHGLRNFITNNVIESSRFVYLIKYANAQKIREVAENEKVVMFVLGGIPDTQIERYYKS
CVEFPDMNSPLEAKRSELARMIKNIRFDDFKNVKQQAKGRENVAKERAKAVIGLYLTVMYLLVKNLVNVNARYVIAIHCLERDF
GLYKEIIPELASKNLKNDYRILSQTLCELCDKSPNLFLKKNERLRKCVEVDINNADSSMTRKYRNCIAHLTVVRELKEYIGDIR
TVDSYFSIYHYVMQRCITKREDDIKQEEKIKYEDDLLKNHGYTKDFVKALNSPFGYNIPRFKNLSIEQLFDRNEYLTEK (SEQ
ID NO: 242)
>OGQ001007270_2
[human gut metagenome]
MAKKNKMKPRELREAQKKARQLKAAEINNNAAPAIAAMPAAEAAAPAAEKKKSSVKAAGMKSILVSENKMYITSFGKGNSAVLE
YEVDNNDYNKTQLSSKGSSNIELHGVNEVNITFSSKHGFESGVEINTSNPTHRSGESSPVRGDMLGLKSELEKRFFGKTFDDNI
HIQLIYNILDIEKILAVYVTNIVYALNNMLGEGDDESHDDFMGYLSTFNTYKVFTNPNGSTLSDDKKENIRKSLSKFNALLKTK
RLGYFGLEEPKTKDTRASEAYKKRVYHMLAIVGQIRQSVFHDKSNELDEYLYSFIDIIDSEYRETLDYLIDERFDSINKGFIQG
NKVNISLLIDMMKGYEADDIIRLYYDFIVLKSQKNLGFSIKKLREKMLDEYGFRFKDKQYDSVRSKMYKLMDFLLFCNYYRNDV
VAGEALVRKLRFSMTDDEKEGIYADEAEKLWGKFRNDFENIADHMNGDVIKELGKADMDFDEKILDSEKKNASDLLYFSKMIYM
LTYFLDGKEINDLLTTLISKFDNIKEFLKIMKSSAVDVECELTAGYKLFNDSQRITNELFIVKNIASMRKPAASAKLTMFRDAL
TILGIDDKITDDRISEILKLKEKGKGIHGLRNFITNNVIESSRFVYLIKYANAQKIREVAKNEKVVMFVLGGIPDTQIERYYKS
CVEFPDMNSSLEVKRSELARMIKNISFDDFKNVKQQAKGRENVAKERAKAVIGLYLTVMYLLVKNLVNVNARYVIAIHCLERDF
GLYKEIIPELASKNLKNDYRILSQTLCELCDNRDESPNLFLKKNKRLRKCVEVDINNADSSMTRKYRNCIAHLTVVRELKEYIG
DIRTVDSYFSIYHYVMQRCITKREDDKKQEEKIKFEDDLLKNHGYTKDFVKALNSPFGYNIPRFKNLSIEQLFDRNEYLTEK
(SEQ ID NO: 243)
>OGQW01001429_6
[human gut metagenome]
MAKKNKMKPRELREAQKKARQLKAAEINNNAAPAIAAAPAAEKKKSSVKAAGMKSILVSENKMYITSFGKGNSAVLEYEVDNND
YNQTQLSSKGSSNIELHGVNEVNITFSSKHGFESGVEINTSNPTHRSGESSPVRWDMLGLKSELEKRFFGKTFDDNIHIQLIYN
ILDIEKILAVYVTNIVYALNNMLGVKGSESHDDFIGYLSTNNTYDVFIDPDNSSLSDDKKANVRKSLSKFNVLLKTKRLGYFGL
EEPKTKDTRVSQAYKKRVYHMLAIVGQIRQCVFHDKSGAKRFDLYSFINNIDPEYRETLDYLVDERFDSINKGFIEGNKINISL
LIDMMKGYEADDIIRLYYDFIVLKSQKNLGFSIKKLREKMLDEYGFRFKDKQYDPVRSKMYKLMDFLLFCNHYRNDVAAGEALV
RKLRFSMTDDEKEGIYADEAAKLWGKFRNDFENIADHMNGDVIKELGKADMDFDEKILDSEKKNASDLLYFSKMIYMLTYFLDG
KEINDLLTTLISKFDNIKEFLKIMKSSAVDVECELTAGYKLFNDSQRITNELFIVKNIASMRKPAASAKLTMFRDALTILGIDD
NITDDRISEILKLKEKGKGIHGLRNFITNNVIESSRFVYLIKYANAQKIREVAKNEKVVMFVLGGIPDTQIERYYKSCVEFPDM
NSSLEAKRSELARMIKNISFDDFKNVKQQAKGRENVAKERAKAVIGLYLTVMYLLVKNLVNVNARYVIAIHCLERDFGLYKEII
PELASKNLKNDYRILSQTLCELCDDRDESPNLFLKKNKRLRKCVEVDINNADSSMTRKYRNCIAHLTVVRELKEYIGDIRTVDS
YFSIYHYVMQRCITKRENDTKQEEKIKYEDDLLKNHGYTKDFVKALNSPFGYNIPRFKNLSIEQLFDRNEYLTEK (SEQ ID
NO: 244)
>OGRA01000610_24
[human gut metagenome]
MAKKNKMKPRELREAQKKARQLKAAEINNNAAPAIAAMPAAQVIAPAAEKKKSSVKAAGMKSILVSENKMYITSFGKGNSAVLE
YEVDKVDNNNYNKTQLSSKDNSNIELRDVNEVNITFSSKHGFESGVEINTSNPTHRSGESSPVRWDMLGLKSELEKRFFGKTFD
DNIHIQLIYNILDIEKILAVYVTNIVYALNNMLGEGDDESHDDFMGYLSAKNTYDVFTDPDESDLSKNIKGNIKKSLSKFNDLL
KTKRLGYFGLEEPKTKDTNALEAYKKRVYHMLAIVGQIRQSVFHDKSSKLDEDLYSFIDIIDSEYRETLDYLVDERFDSINKGF
IQGNKVNISLLIDMMKGYEADDIIRLYYDFIVLKSQKNLGFSIKKLREKMLEEYGYRFKDKQYDSVRSKMYKLMDFLLFCNYYR
NDVAAGEALVRKLRFSMTDDEKEGIYADEAEKLWGKFRNDFENIADHMNGDVIKELGKADMDFDEKILDSEKKNASDLLYFSKM
IYMLTYFLDGKEINDLLTTLISKFDNIKEFLKIMKSSAVDVECELTAGYKLFNDSQRITNELFIVKNIASMRKPAASAKLTMFR
DALTILGIDDKITDDRISEILKLKEKGKGIHGLRNFITNNVIESSRFVYLIKYANAQKIRKVAKNEKVVMFVLGGIPDTQIERY
YKSCVEFPDMNSSLEVKRSELARMIKNISFDDFKNVKQQAKGRENVAKERAKAVIGLYLTVMYLLVKNLVNVNARYVIAIHCLE
RDFGLYKEIIPELASKNLKNDYRILSQTLCELCDKSPNLFLKKNRRLRKCVEVDINNADSSMTRKYRNCIAHLTVVRELKEYIG
DIRTVDSYFSIYHYVMQRCITKRENDTKQEEKIKYEDDLLKNHGYTKDFVKALNSPFGYNIPRFKNLSIEQLFDRNEYLTEK
(SEQ ID NO: 245)
>OGRE01001635_6
[human gut metagenome]
MAKKNKMKPRELREAQKKARQLKAAEINNNAAPAIAAMPAAEAAAPAAEKKKSSVKAAGMKSILVSENKMYITSFGKGNSAVLE
YEVDKVDNNVYNQTQLSSKGSSNIKLCGVNEVNITFSSKHGFESGVEINTSNPTHRSGESSPVRGDMLGLKSELEKRFFGKTFD
DNIHIQLIYNILDIEKILAVYVTNIVYALNNMLGIKGSESYDDFMGYLSARNTYEVFTHPDKSSLSDDKKANVRKSLSKFNVLL
KTKRLGYFGLEEPKTKDTRVSQAYKKRVYHMLAIVGQIRQSVFHDKSSKLHEDLYSFIDIIDSEYRETLDYLVDERFDSINKGF
IQGNKVNISLLIDMMKDDYEADDIIRLYYDFIVLKSQKNLGFSIKKLREKMLDEYGFRFKDKQYDSVRSKMYKLMDFLLFCNYY
RNDVIAGEALVRKLRFSMTDDEKEGIYADEAAKLWGKFRNDFENIADHMNGDVIKELGKADMDFDEKILDSEKKNASDLLYFSK
MIYMLTYFLDGKEINDLLTTLISKFDNIKEFLKIMKSSAVDVECELTAGYKLFNDSQRITNELFIVKNIASMRKPAASAMLTMF
RDALTILGIDDKITDDRISEILKLKEKGKGIHGLRNFITNNVIESSRFVYLIKYANAQKIREVAKNEKVVMFVLGGIPDTQIER
YYKSCVEVPDMNSSLEAKRSELARMIKSISFDDFKNVKQQAKGRENVAKEMAKAVIGLYLTVMYLLVKNLVNVNARYVIAIHCL
ERDFGLYKEIISELASKNLKNDYRILSQTLCELCDNCDESPNLFLKKNKRLRKCVEVDINNADSSMTRKYRNCIAHLTVVRELK
EYIGDIRTVDSYFSIYHYVMQRCITKREDDKKQEEKIKYEDDLLKNHGYTKDFVKALNSPFGYNIPRFKNLSIEQLFDRNEYLT
EK (SEQ ID NO: 246)
>OGRF01000967_2
[human gut metagenome]
MAKKNKMKPRELREAQKKARQLKAVEINNNAVPEIAAMPAAEVIAPVAEKKKSSVKAAGMKSILVSENKMYITSFGKGNSAVLE
YEVDNNDYNKTQLSSKNSSNIELRGVNEVNITFSSKHGFESGVEINTSNPTHRSGESSPVRWDMLGLKSELEKRFFGKTFDDNI
HIQLIYNILDIEKILAVYVTNIVYALNNMLGIKGSESYDDFMGYLSARNTYEVFTHPDKSSLSDDKKANVRKSLSKFNVLLKTK
RLGYFGLEEPKTKDTRVSQAYKKRVYHMLAIVGQIRQSVFHDKSSKLDEDLYSFIDIIDSEYRETLDYLVDERFDSINKGFIQG
NKVNISLLIDMMKGYEADDIIRLYYDFIVLKSQKNLGFSIKKLREKMLEEYGYRFKDKQYDSVRSKMYKLMDFLLFCNYYRNDV
VAGEALVRKLRFSMTDDEKEGIYADEAEKLWGKFRNDFENIADHMNGDVIKELGKADMDFDEKILDSEKKNASDLLYFSKMIYM
LTYFLDGKEINDLLTTLISKFDNIKEFLKIMKSSAVDVECELTAGYKLFNDSQRITNELFIVKNIASMRKPAASAKLTMFRDAL
TILGIDDKITDDRISEILKLKEKGKGIHGLRNFITNNVIESSRFVYLIKYANAQKIREVAENEKVVMFVLGGIPDTQIERYYKS
CVEFPDMNSSLEAKRSELARMIKNISFDNFKNVKQQAKGRENVAKERAKAVIGLYLTVMYLLVKNLVNVNARYVIAIHCLERDF
GLYKEIIPELASKNLKNDYRILSQTLCELCDDRDESPNLFLKKNKRLRKCVEVDINNADSSMTRKYRNCIAHLTVVRELNKYIK
DIRTVDSYFSIYHYVMQRCITKRENDTKQEDKIKYEDDLLKNHGYTKDFVKALNSPFGYNIPRFKNLSIEQLFDRNEYLTEK
(SEQ ID NO: 247)
>OGRN01001989_2
[human gut metagenome]
MAKKNKMKPRELREAQKKARQLKAAEINNNAAPAIAAMPAAEVIAPAAEKKKSSVKAAGMKSILVSENKMYITSFGKGNSAVLE
YEVDKVDDNDYNQTQLSSKDNSNIELGDVNEVNITFSSKHGFESGVEINTSNPTHRSGESSPVRGDMLGLKSELEKRFFGKTFD
DNIHIQLIYNILDIEKILAVYVTNIVYALNNMLGVKGSESHDDFIGYLSTNNIYDVFIDPDNSSLSDDKKANVRKSLSKFNALL
KTKRLGYFGLEEPKTKDNRVSQAYKKRVYHMLAIVGQIRQCVFHDKSGAKRFDLYSFINNIDPEYRDTLDYLVEERLKSINKDF
IEDNKVNISLLIDMMKDYEADDIIRLYYDFIVLKSQKNLGFSIKKLREKMLDEYGYRFKDKQYDSVRSKMYKLMDFLLFCNYYR
NDVVAGESLVRKLRFSMTDDEKEGIYADEASKLWGKFRNDFENIADHMNGDVIKELGKADMDFDEKILDSEKKNASDLLYFSKM
IYMLTYFLDGKEINDLLTTLISKFDNIKEFLKIMKSSAVNVECELTAGYKLFNDSQRITNELFIVKNIASMRKPAASAKLTMFR
DALTILGIDDNITDDRISEILKLKEKGKGIHGLRNFITNNVIESSRFVYLIKYANAQKIREVAKNEKVVMFVLGGIPDTQIERY
YKSCVEFPDMNSSLKAKRSELARMIKNISFEDFKDVKQQAKGRENVAKERAKAVIGLYLTVMYLLVKNLVNVNARYVIAIHCLE
RDFGLYKEIIPELASKNLKNDYRILSQMLCELCDDRDKSPNLFLKKNKRLRKCVEVDINNADSSMTRKYRNCIAHLTVVRELKE
YIGDIYAVDSYFSIYHYVMQRCITKRENDTKQEEKIKYEDNLLKNHGYTKDFVKALNSPFGYNIPRFKNLSIEQLFDRNEYLTE
K (SEQ ID NO: 248)
>OGRQ01003333_5
[human gut metagenome]
MAKKNKMKPRELREAQKKARQLKAAEINNNAAPAIAAMPAAEAAAPAAEKKKSSVKAAGMKSILVSENKMYITSFGKGNSAVLE
YEVDNNDYNQTQLSSKGSSNIELHGVNEVNITFSSKHGFESGVEINTSNPTHRSGESSPVRWDMLGLKSELEKRFFGKTFDDNI
HIQLIYNILDIEKILAVYVTNIVYALNNMLGIKKSESYDDFMGYLSARNTYEVFTHPDKSNLSDKVKGNIKKSLSKFNVLLKTK
RLGYFGLEEPKTKDTNALEAYKKRVYHMLAIVGQIRQSVFHDKSSKLHEDLYSFIDIIDSEYRETLDYLVDERFDSINKGFIQG
NKVNISLLIDMMKDDYEADDIIRLYYDFIVLKSQKNLGFSIKKLREKMLDEYGFRFKDKQYDSVRSKMYKLMDFLLFCNYYRND
VAAGEALVRKLRFSMTDDEKEGIYADEAEKLWGKFRNDFENIADHMNGDVIKELGKADMDFDEKILDSEKKNASDLLYFSKMIY
MLTYFLDGKEINDLLTTLISKFDNIKEFLKIMKSSAVNVECELTAGYKLFNDSQRITNELFIVKNIASMRKPAASAKLTMFRDA
LTILGIDDKITDDRISEILKLKEKGKGIHGLRNFITNNVIESSRFVYLIKYANAQKIREVAKNEKVVMFVLGGIPDTQIERYYK
SCVEFPDMNSSLEAKRSELARMIKNISFDDFKNVKQQAKGRENVAKERAKAVIGLYLTVMYLLVKNLVNVNARYVIAIHCLERD
FGLYKEIIPELASKNLKNDYRILSQTLCELCDDRDESPNLFLKKNKRLRKCVEVDINNADSSMTRKYRNCIAHLTVVRELKEYI
GDIRTVDSYFSIYHYVMQRCITKRENDTKQEEKIKYEDDLLKNHGYTKDFVKALNSPFGYNIPRFKNLSIEQLFDRNEYLTEK
(SEQ ID NO: 249)
>OGRU01000829_2
[human gut metagenome]
MKPRELREAQKKARQLKAAEINNNAAPAIAAMPAAEVIAPAAEKKKSSVKAAGMKSILVSENKMYITSFGKGNSAVLEYEVDNN
DYNKTQLSSKDNSNIELGDVNEVNITFSSKHGFGSGMKINTSNPTHRSGESSPVRWDMLGLKSELEKRFFGKTFDDNIHIQLIY
NILDIEKILAVYVTNIVYALNNMLGEGDDSNYDFMGYLSTFNTYKVFTNPNGSTLSDDKKKNIRKSLRKFNDLLKTKRLGYFGL
EEPKTKDNRVSEAYKKRVYHMLAIVGQIRQCVFHDKSGAKRFDLYSFINNIYPEYRDTLDYLVDERFDSINKGFIQGNKVNISL
LIDMMKGYEPDDIIRLYYDFIVLKSQKNLGFSIKKLREKMLDEYGFRFKDKQYDSVRSKMYKLMDFLLFCNYYRNDIAAGESLV
RKLRFSMTDDEKEGIYADEAAKLWGKFRNDFENIADHMNGDVIKELGKADMDFDEKILDSEKKNASDLLYFSKMIYMLTYFLDG
KEINDLLTTLISKFDNIKEFLKIMKSSAVDVECELTVGYKLFNDSQRITNELFIVKNIASMRKPAASAKLTMFRDALTILGIDD
KITDDRISEILKLKEKGKGIHGLRNFITNNVIESSRFVYLIKYANAQKIRKVAENEKVVMFVLGGIPDAQIERYYKSCVEFPDM
NSSLEVKRSELARMIKNISFDDFKNVKQQAKGRENVAKERAKAVIGLYLTVMYLLVKNLVNVNARYVIAIHCLERDFGLYKEII
PELASKNLKNDYRILSQTLCELCDNGDESPNLFLKKNKRLRKCVEVDINNADSNMTRKYRNCIAHLTVVRELNKYIKDIRTVDS
YFSIYHYVMQRCITKREDDKKQEEKIKYEDDLLKNHGYTKDFVKALNSPFGYNIPRFKNLSIEQLFDRNEYLTEK (SEQ ID
NO: 250)
>OGSD01001176_18
[human gut metagenome]
MAKKNKMKPRELREAQKKARQLKAAEINNNAAPAIAAMPAAEVIAPAAEKKKSSVKAAGMKSILVSENKMYITSFGKGNSAVLE
YEVDNNDYNKTQLSSESSSNIELCGVTKVNITFSSKHGFGSGVEINTSNPTHRSGESSPVRWDMLGLKSELEKRFFGKTFDDNI
HIQLIYNILDIEKILAVYVTNIVYALNNMLGVKGSESYDDFMGYLSAQNTYYIFTHPDKSNLSDKVKGNIKKSLSKFNDLLKTK
RLGYFGLEEPKTKDTRVSQAYKKRVYHMLAIVGQIRQCVFHDKSGAKRFDIYSFINNIDPEYRETLDYLVDERFDSINKGFIQG
NKVNISLLIDMMKGYEADDIIRLYYDFIVLKSQKNLGFSIKKLREKMLDEYGFRFKDKQYDSVRSKMYKLMDFLLFCNYYRNDV
VAGEALVRKLRFSMTDDEKEGIYADEAEKLWGKFRNDFEYIADHMNGDVIKELGKADMDFDEKILDSEKKNASDLLYFSKMIYM
LTYFLDGKEINDLLTTLISKFDNIKEFLKIMKSSAVDVECELTAGYKLFNDSQRITNELFIVKNIASMRKPAASAKLTMFRDAL
TILGIDDNITDDRISEILKLKEKGKGIHGLRNFITNNVIESSRFVYLIKYANAQKIREVAENEKVVMFVLGGIPDTQIERYYKS
CVEVPDMNSSLEAKRSELARMIKNISFDDFKNVKQQAKGRENVAKERAKAVIGLYLTVMYLLVKNLVNVNARYVIAIHCLERDF
GLYKEIIPELASKNLKNDYRILSQTLCELCDDRDESPNLFLKKNKRLRKCVEVDINNADSSMTRKYRNCIAHLTVVRELKEYIG
DIRTVDSYFSIYHYVMQRCITKREDDKKQEEKIKYEDDLLKNHGYTKDFVKALNSPFGYNIPRFKNLSIEQLFDRNEYLTEK
(SEQ ID NO: 251)
>OGWY01002732_3
[human gut metagenome]
MGKKIHARDLREQRKTDRTEKFADQNKKREAQRAVQKKDAAVSVKSVSSVSSKKDNVTKSMAKAAGVKSVFAVGNTVYMTSFGR
GNDAVLEQKIVDTSHEPLNIDDPAYQLNVVTMNGYSVTGHRGETVSAVTDNPLRRFNGRKKDEPEQSVPTDMLCLKPTLEKKFF
GKEFDDNIHIQLIYNILDIEKILAVYSTNAIYALNNMSADENIENSDFFMKRTTDETFDDFEKKKESTNSREKADFDAFEKFIG
NYRLAYFADAFYVNKKNPKGKARNVLREDKELYSVLTLIGKLRHWCVHSEEGRAEFWLYKLNELKDDFKNVLDVVYNRPVEEIN
NRFIENNKVNIQILGSVYKNTDIAELVRSYYEFLITKKYKNMGFSIKKLRESMLEGKGYADKEYDSVRNKLYQMTDFILYTGYI
NEDSDRADDLVNTLRSSLKEDDKTTVYCKEADYLWKKYCESIREVAEALDGDNIKRLSKSNIEIRDNELRKCFISYADSVSEFT
KLIYLLTRFLSGKEINDLVTTLINKFDNIRSFLEIMDELGLDRTFTAEYSFFEGSTKYLAELVELNSFVKSCSFDINAKRTMYR
DALDILGIKSGKTEEDIEKMIDNILQIDANGDKKLEKNNGLRNFIASNVIDSNRFKYLVRYGNPKKIRETAKCKPAVRFVLNEI
PDAQIERYYEACCPKNTALCSANKRREKLADMIAEIKFENFSDAGNYQKANVTSKTHEAEIKRKNQAIIRLYLTVMYIMLKNLV
NVNARYVIAFHCVERDTKLYAESGLEVGNIEKNKTNLTMAVMGVKLENGIIKTEFDKSLAENAANRYLRNARWYKLILDNLKKS
ERAVVNEFRNTVCHLNAIRNININIDGIKEVENYFALYHYLIQKHLENRFADNGGSTGDYIGKLEEHKTYCKDFVKAYCTPFGY
NLVRYKNLTIDGLFDKNYPGKDDSDEQK (SEQ ID NO: 252)
>OGXI01000433_6
[human gut metagenome]
MAKKNKMKPRELREAQKKARQLKAAEINNNAVPAIAAMPAAEAAAPAAEKKKSSVKAAGMKSILVSENKMYITSFGKGNSAVLE
YEVDNNDYNKTQLSSKDNSNIELCDVDEVNITFSSKHGFESGVKINTSNPTHRSGESSSVRGDMLGLKSELEKRFFGKTFDDNI
HIQLIYNILDIEKILAVYVTNIVYALNNMLGLENESNNDFMGYLSAKNTYDVFTDPDESDLSKNIKGNIKKSLSKFNDLLKTKR
LGYFGLEEPKTKDKRVSEAYKKRVYHMLAIVGQIRQSVFHDKSNELDEYLYSFIDIIDSEYRETLDYLIDERFDSINKGFIQGN
KVNISLLIDMMKDDYEADDIIRLYYDFIVLKSQKNLGFSIKKLREKMLDEYGFRFKDKQYDSVRSKMYKLMDFLLFCNYYRNDV
IAGEALVRKLRFSMTDDEKEGIYADEAAKLWGKFRNDFENIADHMNGDVIKELGKADMDFDEKILDSEKKNASDLLYFSKMIYM
LTYFLDGKEINDLLTTLISKFDNIKEFLKIMKSSAVNVECELTAGYKLFNDSQRITNELFIVKNIASMRKPAASAKLTMFRDAL
TILGIDDKITDDRISEILKLKEKGKGIHGLRNFITNNVIESSRFVYLIKYANAQKIREVAENEKVVMFVLGGIPDTQIERYYKS
CVEFPDMNSSLEVKRSELARMIKNIRFDDFKNVKQQAKGRENVAKERAKAVIGLYLTVMYLLVKNLVNVNARYVIAIHCLERDF
GLYKEIIPELASKNLKNDYRILSQTLCELCDNGDESPNLFLKKNRRLRKCVEVDINNADSSMTRKYRNCIAHLTVVRELKEYIG
DIRTVDSYFSIYHYVMQRCITKREDDTKQEDKIKYEDDLLKNHGYTKDFVKALNSPFGYNIPRFKNLSIEQLFDRNEYLTEK
(SEQ ID NO: 253)
>OGXJ01002463_5
[human gut metagenome]
MAKKNKMKPRELREAQKKARQLKAAEINNNAAPAIAAMPAAEVIAPAAEKKKSSVKAAGMKSILVSENKMYITSFGKGNSAVLE
YEVDKVDNNNYNKTQLSSKDNSNIELGDVNEVNITFSSKRGNESGVEINTSNPTHRSGESSPVRWDMLGLKSELEKRFFGKTFD
DNIHIQLIYNILDIEKILAVYVTNIVYALNNMLGIKKSESYDDFMGYLSARNTYEVFTHPDKSNLSDKAKGNIKKSFSTFNDLL
KTKRLGYFGLEEPKTKDTRVSQAYKKRVYHMLAIVGQIRQSVFHDKSSKLDEDLYSFIDIIDSEYRETLDYLVDERFDSINKGF
IQGNKVNISLLIDMMKGYETDDIIRLYYDFIVLKSQKNLGFSIKKLREKMLDEYGFRFKDKQYDSVRSKMYKLMDFLLFCNYYR
NDVVAGEALVRKLRFSMTDDEKEGTYADEAEKLWGKFRNDFENIADHMNGDAIKELGKADMDFDEKILDSEKKNASDLLYFSKM
IYMLTYFLDGKEINDLLTTLISKFDNIKEFLKIMKSSAVDVECELTAGYKLFNDSQRITNELFIVKNIASMRKPAASAKLTMFR
DALTILGIDDNITDDRISEILKLKEKGKGIHGLRNFITNNVIESSRFVYLIKYANAQKIREVAKNEKVVMFVLGGIPDTQIERY
YKSCVEFPDMNSSLEAKRSELARMIKNISFDDFKNVKQQAKGRENVAKERAKAVIGLYLTVMYLLVKNLVNVNARYVIAIHCLE
RDFGLYKEIIPELASKNLKNDYRILSQTLCELCDKSPNLFLKKNERLRKCVEVDIYNADSSMTRKYRNCIAHLTVVRELKEYIG
DIRTVDSYFSIYHYVMQRCITKREDDTKQEEKIKYEDDLLKNHGYTKDFVKALNSPFGYNIPRFKNLSIEQLFDRNEYLTEK
(SEQ ID NO: 254)
>OGXL01002096_10
[human gut metagenome]
MAKKNKMKPRELREAQKKARQLKAAEINNNAVPAIAAMPAAEVIAPAAEKKKSSVKAAGMKSILVSENKMYITSFGKGNSAVLE
YEVDKVDDNDYNKTQLSSKDNSNIELGNVNEVNITFSSRRGFESGVEINTSNPTHRSGESSSVRGDMLGLKSELEKRFFGKTFD
DNIHIQLIYNILDIEKILAVYVTNIVYALNNMLGVKGSESYDDFMGYLSAQNTYYIFTHPDKSNLSDKVKGNIKKSLSKFNDLL
KTKRLGYFGLEEPKTKDKRVSEAYKKRVYHMLAIVGQIRQSVFHDKSNELDEYLYSFIDIIDSEYRDTLDYLVDERFDSINKGF
IQGNKVNISLLIDMMKDDYEADDIIRLYYDFIVLKSQKNLGFSIKKLREKMLEEYGFRFKDKQYDSVRSKMYKIMDFLLFCNYY
RNDVVAGEALVRKLRFSMTDDEKEGIYADEAAKLWGKFRNDFENIADHMNGDVIKELGKADMDFDEKILDSEKKNASDLLYFSK
MIYMLTYFLDGKEINDLLTTLISKFDNIKEFLKIMKSSAVDVECELTAGYKLFNDSQRITNELFIVKNIASMRKPAASAKLTMF
RDALTILGIDDKITDDRISEILKLKEKGKGIHGLRNFITNNVIESSRFVYLIKYANAQKIREVAKNEKVVMFVLGGIPDTQIER
YYKSCVEFPDMNSSLEVKRSELARMIKNISFDDFKNVKQQAKGRENVAKERAKAVIGLYLTVMYLLVKNLVNVNARYVIAIHCL
ERDFGLYKEIIPELASKNLKNDYRILSQTLCELCDKSPNLFLKKNERLRKCVEVDINNADSSMTRKYRNCIAHLTVVRELKEYI
GDIRTVDSYFSIYHYVMQRCITKRENDTKQEDKIKYEDDLLKNHGYTKDFVKALNSPFGYNIPRFKNLSIEQLFDRNEYLTEK
(SEQ ID NO: 255)
>OGYD01000683_23
[human gut metagenome]
MAKKNKMKPRELREAQKKARQLKAAEINNNAVPAIAAMPAAEAAAPAAEKKKSSVKAAGMKSILVSENKMYITSFGKGNSAVLE
YEVDNNDYNKTQLSSKDNSNIELCDVNEVNITFSSKHGFESGVEINTSNPTHRSGESSPVRWDMLGLKSELEKRFFGKTFDDNI
HIQLIYNILDIEKILAVYITNIVYALNNMLGVKGSESHDDFIGYLSTNNIYDVFIDPDNSSLSDDKKANVRKSLSKFNALLKTK
RLGYFGLEEPKTKDNRVSEAYKKRVYHMLAIVGQIRQSVFHDKSSKLHEDLYSFIDIIDSEYRETLDYLVDERFDSINKGFIQG
NKVNISLLIDMMKGYEADDIIRLYYDFIVIKSQKNLGFSIKKLREKMLDEYGFRFKDKQYDSVRSKMYKLMDFLLFCNYYRNDV
VAGEALVRKLRFSMTDDEKEGIYADEAEKLWGKFRNDFENIADHMNGDVIKELGKADMDFDEKILDSEKKNASDLLYFSKMIYM
LTYFLDGKEINDLLTTLISKFDNIKEFLKIMKSSAVNVECELTAGYKLFNDSQRITNELFIVKNIASMRKPAASAKLTMFRDAL
TILGIDDKITDDRISEILKLKEKGKGIHGLRNFITNNVIESSRFVYLIKYANAQKIREVAKNEKVVMFVLGGIPDTQIERYYKS
CVEFPDMNSSLEAKRSELARMIKNISFDDFKNVKQQAKGRENVAKERAKAVIGLYLTVMYLLVKNLVNVNARYVIAIHCLERDF
GLYKEIIPELASKNLKNDYRILSQTLCELCDKSPNLFLKKNKRLRKCVEVDINNADSSMTRKYRNCIAHLTVVRELKEYIGDIR
TVDSYFSIYHYVMQRCITKRENDTKQEDKIKYEDDLLKNHGYTKDFVKALNSPFGYNIPRFKNLSIEQLFDRNEYLTEK (SEQ
ID NO: 256)
>OGYL01002810_3
[human gut metagenome]
MAKKNKMKPRELREAQKKARQFKAAEINNNAAPAIAAMPAAEVIAPVAEKKKSSVKAAGMKSILVSENKMYITSFGKGNSAVLE
YEVDNNDYNKTQLSSKDNSNIELCGVNEVNITFSSKHGFESGVEINTSNPTHRSGESSPVRWDMLGLKSELEKRFFGKTFDDNI
HIQLIYNILDIEKILAVYVTNIVYALNNMLGEGDESNYDFMGYLSTFNTYKVFTNPNGSTLSDDKKENIRKSLSKFNALLKTKR
LGYFGLEEPKTKDTRVLEAYKKRVYHMLAIVGQIRQCVFHDLSEHSEYDLYSFIDNSKKVYRECRETLDYLVDERFDSINKGFI
QGNKVNISLLIDMMKGYEADDIIRLYYDFIVLKSQKNLGFSIKKLREKILDEYGFRFKDKQYDSVRSKMYKLMDFLLFCNYYRN
DIAAGESLVRKLRFSMTDDEKEGIYADEAAKLWGKFRNDFENIADHMNGDVIKELGKADMDFDEKILDSEKKNASNRFILFSTM
IYMLTYFLDGKEINDLLTTLISKFDNIKEFLKIMKSSAIDVECELTAGYKLFNDSQRITNELFIVKNIASMRKPAASAKLTMFR
DALTILGIDDKITDDRISEILKLKEKGKGIHGLRNFITNNVIESSRFVYLIKYANAQKIREVAKNEKVVMFVLGGIPDTQIERY
YKSCVEFPDMNSSLEAKRSELARMIKNIRFDDFKNVKQQAKGRENVAKERAKAVIGLYLTVMYLLVKNLVNVNARYVIAIHCLE
RDFGLYKEIIPELASKNLKNDYRILSQTLCELCDNGDESPNLFLKKNKRLRKCVEVDINNADSSMTRKYRNCIAHLTVVRELKE
YIGDIRTVDSYFSIYHYVMQRCITKREDDTKQEEKIKYEDDLLKNHGYTKDFVKALNSPFGYNIPRFKNLSIEQLFDRNEYLTE
K (SEQ ID NO: 257)
>OGYY01000371_37
[human gut metagenome]
MAKKNKMKPRELREAQKKARQLKAAEINNNATPTIAAMPAAEVIAPAAEKKKSSVKAAGMKSILVSKNKMYITSFGKGNSAVLE
YEVDNNDYNQTQLSSKNSSNIELRGVNEVNITFSSKHGFESGVEINTSNPTHRSGESSSVRGDMLGLKSELEKRFFGKTFDDNI
HIQLIYNILDIEKILAVYVTNIVYALNNMLGIKDSESYDDFIGYLSARNTYKVFTHPDKSNLSDKVKGNIKKSFSTFNDLLKTK
RLGYFGLEEPKTKDTRVSQAYKKRVYHMLAIVGQIRQSVFHDKSSKLDEDLYSFIDIIDPEYRETLDYLVDERFDSINKGFIQG
NKVNISLLIDMMKGYEADDIIRLYYDFIVLKSQKNLGFSIKKLREKMLDEYGFRFKDKQYDSVRSKMYKLMDFLLFCNYYRNDV
VAGEALVRKLRFSMTDDEKEGIYADEAAKLWGKFRNDFENIADHMNGEAIKELGKADMDFDEKILDSEKKNASDLLYFSKMIYM
LTYFLDGKEINDLLTTLISKFDNIKEFLKIMKSSAVDVECELTAGYKLFNDSQRITNELFIVKNIASMRKPAASAKLTMFRDAL
TILGIDDNITDDRISEILKLKEKGKGIHGLRNFITNNVIESSRFVYLIKYANAQKIREVAKNEKVVMFVLGGIPDTQIERYYKS
CVEFPDMNSSLEAKRSELARMIKNIGFDDFKNVKQQAKGRENVAKERAKAVIGLYLTVMYLLVKNLVNVNARYVIAIHCLERDF
GLYKEIIPELASKNLKNDYRILSQTLCELCDDRDESPNLFLKKNKRLRKCVEVDINNADSSMTRKYRNCIAHLTVVRELKEYIG
DIRTVDSYFSIYHYVMQRCITKREDDTKQEDKIKYEDDLLKNHGYTKDFVKALNSPFGYNIPRFKNLSIEQLFDRNEYLTEK
(SEQ ID NO: 258)
>OGZC01000639_10
[human gut metagenome]
MKKKNIRATREALKAQKIKKSQENEALKKQKLAEEAAQKRREELEKKNLAQWEETSAEGRRSRVKAVGVKSVFVVGDDLYLATF
GNGNETVLEKKITPDGKITTFPEEETFTAKLKFAQTEPTVATSIGISNGRIVLPEISVDNPLHTTMQKNTIKRSAGEDILQLKD
VLENRYFDRSFNDDLHIRLIYNILDIEKILAEYTTNAVFAIDNVSGCSDDFLSNFSTRNQWDEFQNPEQHREHFGNKDNVICSV
KKQQDLFFNFFKNNRIGYFGKAFFHAESERKIVKKTEKEVYHILTLIGSLRQWITHSTEGGISRLWLYQLEDALSREYQETMNN
CYNSTIYGLQKDFEKTNAPNLNFLAEILGKNASELAEPYFRFIITKEYKNLGFSIKTLREMLLDQPDLQEIRENHNVYDSIRSK
LYKMIDFVLVYAYSNERKSKADALASNLRSAITEDAKKRIYQNEADQLWTSYQELFKRIRGFKGAQVKEYSSKNMPIPIQKQIQ
NILKPAEQVTYFTKLMYLLTMFLDGKEINDLLTTLINKFDNISSLLKTMEQLELQTTFKEDYTFFQQSSRLCKEITQLKSFARM
GNPISNLKEVMMVDAIQILGTEKSEQELQSMACFFFRDKNGKKLNTGEHGMRNFIGNNVISNTRFQYLIRYGNPQKLHTLSQNE
TVVRFVLSRIAKNQRVQGMNGKNQIDRYYETCGGTNSWSVSEEEKINFLCKILTNMSYDQFQDVKQSGAEITAEEKRKKERYKA
IISLYLTVLYQLIKNLVNINARYIIAFHCLERDAILYSSKFNTSINLKKRYTALTEMILGYETDEKARRKDTRTVYEKAEAAKN
RHLKNVKWNCKTRENLENADKNAIVAFRNIVAHLWIIRDADRFITGMGAMKRYFDCYHYLLQRELGYILEKSNQGSEYTKKSLE
KVQQYHSYCKDFLHMLCLPFAYCIPRYKNLSIAELFDRHEPEAEPKEEASSVNNSQFITT (SEQ ID NO: 259)
>OHAI01000724_7
[human gut metagenome]
MAKKNKMKPRELREAQKKARQLKAAEINNNAVPAIAAMPAVEVIAPAAEKKKSSVKAAGMKSILVSENKMYITSFGKGNSAVLE
YEVDNNDYNKTQLSSKDNSNIELGNVNEVNITFSSRRGFESGVEINTSNPTHRSGESSSVRGDMLGLKSELEKRFFGKTFDDNI
HIQLIYNILDIEKILAVYVTNIVYALNNMLGVKGSESYDDFMGYLSAQNTYYIFTHPDKSNLSDKVKGNIKKSLSKFNDLLKTK
RLGYFGLEEPKTKDKRVSEAYKKRVYHMLAIVGQIRQSVFHDKSNELDEYLYSFIDIIDSEYRDTLDYLVDERFDSINKGFIQG
NKVNISLLIDMMKGYEADDIIRLYYDFIVLKSQKNLGFSIKKLREKMLDEYGFRFKDKQYDSVRSKMYKLMDFLLFCNYYRNDV
VAGEALVRKLRFSMTDDEKEGIYADEAAKLWGKFRNDFENIADHMNGDVIKELGKADMDFDEKILDSEKKNASDLLYFSKMIYM
LTYFLDGKEINDLLTTLISKFDNIKEFLKIMKSSAVDVECELTAGYKLFNDSQRITNELFIVKNIASMRKPAASAKLTMFRDAL
TILGIDDNITDDRISEILKLKEKGKGIHGLRNFITNNVIESSRFVYLIKYANAQKIREVAENEKVVMFVLGGIPDTQIERYYKS
CVEVPDMNSSLEAKRSELARMIKNISFDDFKNVKQQAKGRENVAKERAKAVIGLYLTVMYLLVKNLVNVNARYVIAIHCLERDF
GLYKEIIPELASKNLKNDYRILSQTLCELCDNGDESPNLFLKKNKRLRKCVEVDINNADSSMTRKYRNCIAHLTVVRELKEYIG
DIRTVDSYFSIYHYVMQRCITKRENDTKQEEKIKYEDDLLKNHGYTRDFVKALNSPFGYNIPRFKNLSIKQLFDRNEYLTEK
(SEQ ID NO: 260)
>OHAJ01000052_20
[human gut metagenome]
MAKKKRITAKERKQNHRESLMKKADSNAEKEKAKKPVVENKPDTAISKDNTPKPNKEIKKSKAKLAGVKWVIKANDDVAYISSF
GKGNNSVLEKRIIGDVSSDVNKDSHMYVNPKYTKKNYEIKNGFSSGSSLTTHPNKPDKNSGMDALCLKIYFEKEIFKDKFNDNM
HIQTIYNIFDIEKTLAKHITNIIYAVNSLDRSYIQSGNDTIGFGLNYRIPYAKYGRGKDSNGKPNNSNLKKRESFIKFYNNAKD
RFGYFESVFYQNGKPISREKLYIYLNILNFVRNSTFHYNNTSTYLYRKEYKYTDKDNCSVKEFEFVSYLNEFVKNKFKNVNKNF
ISNEKNNLYIILNAYGEDIEDVEVVKKYSKELYKLSVLKTNKNLGVNVKKLRESAIEYGYCPLPYDKEKEVAKLSSIKHKLYKT
YDFVITHYLNSNDKLLLEIVEALRLSKNDDEKENVYKIYAEKIFKAEYVINPIKTISNLFAEKGDKLFNEKVSISEEYVEDIRI
DKNIHNFTKVIFFLTCFLDGKEINDLLTNIISKLQVIEDHNNVIKAIANNNDAVYKDYSDKYAVFKNSGKIATKLEAIKSIARM
ENKINKAFKEPLLKDAMLALGVSPNDLDEKYEKYFKTDVDADKDHQKVSTFLMNNVINNSRFKYVVKYINPADINRLAKNKHLV
KFVLDQIPHKQIDSYYNSVCTVEEPSYKGKIQLLTKKITGLNFYSLFENCKIPNVEKEKKKAVITLYFTIIYILVKNLVNINGL
YTLALYFVERDGFFYKKICEKKDKKKTNKDVDYLLLPEIFSGSKYREETKNLKLPKEKDREIMKKYLPNDEDRKEYNKFFKQYR
NNIVHLNIIANLSKLTSTIDKEINSYFEIFHYCAQRVMFDYCKNNNKVVLAKMKDLAHIKSDCDEFSSKYTYPYSSAVLRFMNL
PFAYNVPRFKNLSYQKFFDKQRLEALEKNLNI (SEQ ID NO: 261)
>OHAN01001071_11
[human gut metagenome]
MAKKNKMKPRELREAQKKARQLKAAEINNNAAPAIAAMPAAEAAAPAAEKKKSSVKAAGMKSILVSENKMYITSFGKGNSAVLE
YEVDKVDNNDYNQTQLSSKGSSNIELHGVNEVNITFSSKHGFESGVEINTSNPTHRSGESSPVRWDMLGLKSELEKRFFGKTFD
DNIHIQLIYNILDIEKILAVYVTNIVYALNNMLGIKDSESYDDFMGYLSAKNTYDVFTDPDESDLSKNIKGNIKKSFSTFNDLL
KTKRLGYFGLEEPKTKDTRVSEAYKKRVYHMLAIVGQIRQCVFHDKSGAKRFDLYSFINNIDPEYRDTLDYLVEERLKSINKDF
IEGNKVNISLLIDMMKGYEADDIIRLYYDFIVLKSQKNLGFSIKKLREKMLDEYGFRFKDKQYDSVRSKMYKLMDFLLFCSYYR
NDVVAGEALVRKLRFSMTDDEKEGIYADEAEKLWGKFRNDFENIADHMNGDVIKELGKADMDFDEKILDSEKKNASDLLYFSKM
IYMLTYFLDGKEINDLLTTLISKFDNIKEFLKIMKSSAVDVECELTAGYKLFNDSQRITNELFIVKNIASMRKPAASAKLTMFR
DALTILGIDDKITDDRISEILKLKEKGKGIHGLRNFITNNVIESSRFVYLIKYANAQKIREVAKNEKVVMFVLGGIPDTQIERY
YKSCVEFPDMNSSLEVKRSELARMIKNISFDDFKNVKQQAKGRENVAKERAKAVIGLYLTVMYLLVKNLVNVNARYVIAIHCLE
RDFGLYKEIIPELASKNLKNDYRTLSQTLCELCDKSPNLFLKKNERLRKCVEVDINNADSIMTRKYRNCIAHLTVVRELKEYIG
DIRTVDSYFSIYHYVMQRCITKRENDTKQEDKIKYEDDLLKNHGYTKDFVKALNSPFGYNIPRFKNLSIEQLFDRNEYLTEK
(SEQ ID NO: 262)
>OHAR01000226_9
[human gut metagenome]
MAKKNKMKPRELREAQKKARQLKVAEINNNAVPAIAAMPAAEAAAPAAEKKKSSVKAAGMKSILVSKNKMYITSFGKGNSAVLE
YEVDKVDNDNYNKTQLSSKDNSNIELGDVDEVNITFSSKHGFESGVEINTSNPTHRSGESSPVRWDMLGLKSELEKRFFGKTFD
DNIHIQLIYNILDIEKILAVYVTNIVYALNNMLGIKKSESYDDFMGYLSARNTYEVFTHPDKSNLSDKVKGNIKKSLSKFNVLL
KTKRLGYFGLEEPKTKDTNALEAYKKRVYHMLAIVGQIRQSVFHDKSSKLHEDLYSFIDIIDSEYRETLDYLVDERFDSINKGF
IQGNKVNISLLIDMMKDDYEADDIIRLYYDFIVLKSQKNLGFSIKKLREKMLDEYGFRFKDKQYDSVRSKMYKLMDFLLFCNYY
RNDVVAGEALVRKLRFSMTDDEKEGIYADEAEKLWGKFRNDFENIADHMNGDVIKELGKADMDFDEKILDSEKKNASDLLYFSK
MIYMLTYFLDGKEINDLLTTLISKFDNIKEFLKIMKSSAVNVECELTAGYKLFNDSQRITNELFIVKNIASMRKPAASAKLTMF
RDALTILGIDDKITDDRISEILKLKEKGKGIHGLRNFITNNVIESSRFVYLIKYANAQKIREVAKNEKVVMFVLGGIPDTQIER
YYKSCVEFPDMNSSLEAKRSELARMIKNISFDDFKNVKQQAKGRENVAKERAKAVIGLYLTVMYLLVKNLVNVNARYVIAIHCL
ERDFGLYKEIIPELASKNLKNDYRILSQTLCELCDDRDESPNLFLKKNRRLRKCVEVDINNADSSMTRKYRNCIAHLTVVRELK
EYIGDIRTVDSYFSIYHYVMQRCITKREDDTKQEDKIKYEDDLLKNHGYTKDFVKALNSPFGYNIPRFKNLSIEQLFDRNEYLT
EK (SEQ ID NO: 263)
>OHBL01000590_7
[human gut metagenome]
MAKKNKMKPRERREAQKKARQLKAAEINNNAVPAIAAMPAAEVIAPAAEKKKSSVKAAGMKSILVSENKMYITSFGKGNSAVLE
YEVDNNDYNKTQLSSKDNSNIELGDVNEVNITFSSRRGFESGVEINTSNPTHRSGESSSVRGDMLGLKSELEKRFFGKNFDDNI
HIQLIYNILDIEKILAVYVTNIVYALNNMLGVKGSESYDDFMGYLSAKNTYEVFTHPDKSNLSDKVKGNIKKSFSTFNDLLKTK
RLGYFGLEEPKTKDTRVSQAYKKRVYHMLAIVGQIRQSVFHDKSSKLHEDLYSFIDIIDSEYRETLDYLVEERLKSINKDFIEG
NKVNISLLIDMMKGYEADDIIRLYYDFIVLKSQKNLGFSIKKLREKMLDEYGFRFKDKQYDPVRSKMYKLMDFLLFCNYYRNDV
VTGEALVRKLRFSMTDDEKEGIYADEASKLWGKFRNDFENIADHMNGDVIKELGKADMDFDEKILDSEKKNASDLLYFSKMIYM
LTYFLDGKEINDLLTTLISKFDNIKEFLKIMKSSAVDVECELTAGYKLFNDSQRITNELFIVKNIASMRKPASSAKLTMFRDAL
TILGIDDNITDDRISEILKLKEKGKGIHGLRNFITNNVIESSRFVYLIKYANAQKIRKVAKNEKVVMFVLGGIPDTQIERYYKS
CVEFPDMNSSLEVKRSELARMIKNISFDDFKNVKQQAKGRENVAKERAKAVIGLYLTVMYLLVKNLVNVNARYVIAIHCLERDF
GLYKEIIPELASKNLKNDYRILSQTLCELCDKSPNLFLKKNERLRKCVEVDINNADSSMTRKYRNCIAHLTVVRELKEYIGDIR
TVDSYFSIYHYVMQRCITKRENDTKQEEKIKYEDDLLKNHGYTKDFVKALNSPFGYNIPRFKNLSIEQLFDRNEYLTEK (SEQ
ID NO: 264)
>OHBP01000023_129
[human gut metagenome]
MAKKNKMKPRELREAQKKARQLKAAEINNNAAPAIAAMPAAEVIAPVAEKKKSSVKAAGMKSILVSENKMYITSFGKGNSAVLE
YEVDNNDYNKTQLSSKDNSNIELGDVNEVNITFSSKHGFGSGVEINTSNPTHRSGESSPVRGDMLGLKSELEKRFFGKTFDDNI
HIQLIYNILDIEKILAVYVTNIVYALNNMLGIKDSESYDDFMGYLSARNTYEVFTHPDKSNLSDKVKGNIKKSLSKFNDLLKTK
RLGYFGLEEPKTKDTRASEAYKKRVYHMLAIVGQIRQCVFHDKSGAKRFDLYSFINNIDPEYRDTLDYLVEERLKSINKDFIEG
NKVNISLLIDMMKGYEADDIIRLYYDFIVLKSQKNLGFSIKKLREKMLEEYGFRFKDKQYDSVRSKMYKLMDFLLFCNYYRNDV
AAGEALVRKLRFSMTDDEKEGIYADEAAKLWGKFRNDFENIADHMNGDVIKELGKADMDFDEKILDSEKKNASDLLYFSKMIYM
LTYFLDGKEINDLLTTLISKFDNIKEFLKIMKSSAVDVECELTAGYKLFNDSQRITNELFIVKNIASMRKPAASAKLTMFRDAL
TILGIDDNITDDRISEILKLKEKGKGIHGLRNFITNNVIESSRFVYLIKYANAQKIREVAKNEKVVMFVLGGIPDTQIERYYKS
CVEFPDMNSSLEAKRSELARMIKNISFDDFKNVKQQAKGRENVAKERAKAVIGLYLTVMYLLVKNLVNVNARYVIAIHCLERDF
GLYKEIIPELASKNLKNDYRILSQTLCELCDDRDESPNLFLKKNKRLRKCVEVDINNADSSMTRKYRNCIAHLTVVRELKEYIG
DIRTVDSYFSIYHYVMQRCITKRENDTKQEEKIKYEDDLLKNHGYTKDFVKALNSPFGYNIPRFKNLSIEQLFDRNEYLTEK
(SEQ ID NO: 265)
>OHBQ01000429_2
[human gut metagenome]
MAKKNKMKPRELREAQKKARQLKAAEINNNAAPAIAAMPAAQVIAPAAEKKKSSVKAAGMKSILVSENKMYITSFGKGNSAVLE
YEVDKVDNNVYNQTQLSSKGSSNIKLCGVNEVNITFSSKHGFESGVEINTSNPTHRSGESSPVRGDMLGLKSELEKRFFGKTFD
DNIHIQLIYNILDIEKILAVYVTNIVYALNNMLGVKDSESYDDFMGYLSARNTYEVFTHPDKSNLSDKVKGNIKKSLSKFNDLL
KTKRLGYFGLEEPKTKDTRVSQAYKKRVYHMLAIVGQIRQCVFHDLSEHSEYDLYSFIDNSKKVYRECRETLDYLVDERFDSIN
KGFIQGNKVNISLLIDMMKGYEADDIIRLYYDFIVLKSQKNLGFSIKKLREKMLDEYGYRFKDKQYDSVRSKMYKLMDFLLFCN
YYRNDVVAGEALVRKLRFSMTDDEKEGIYADEAEKLWGKFRNDFENIADHMNGDVIKELGKADMDFDEKIIDSEKKNASDLLYF
SKMIYMLTYFLDGKEINDLLTTLISKFDNIKEFLKIMKSSAVNVECELTAGYKLFNDSQRITNELFIVKNIASMRKPAASAKLT
MFRDALTILGIDDNITDDRISEILKLKEKGKGIHGLRNFITNNVIESSRFVYLIKYANAQKIREVAENEKVVMFVLGGIPDTQI
ERYYKSCVEFHDMNSSLEAKRSELARMIKNISFDDFKNVKQQAKGRENVAKERAKAVIGLYLTVMYLLVKNLVNVNARYVIAIH
CLERDFGLYKEIIPELASKNLKNDYRILSQTLCELCDDRDESPNLFLKKNKRLRKCVEVDINNADSSMTRKYRNCIAHLTVVRE
LKEYIGDIRTVDSYFSIYHYVMQRCITKREDDTKQEDKIKYEDDLLKNHGYTKDFVKALNSPFGYNIPRFKNLSIEQLFDRNEY
LTEK (SEQ ID NO: 266)
>OHBW01001448_1
[human gut metagenome]
MAKKNKMKPRELREAQKKARQLKAAEINNNAVPAIAAMPAAEVIAPAAEKKKSSVKAAGMKSILVSENKMYITSFGKGNSAVLE
YEVDNNDYNKTQLSSKDNSNIELGNVNEVNITFSSKHGFESGVEINTSNPTHRSGESSPVRWDMLGLKSELEKRFFGKTFDDNI
HIQLIYNILDIEKILAVYVTNIVYALNNMLGEGDESNYDFMGYLSTFNTYKVFTNPNGSTLSDDKKENIRKSLSKFNALLKTKR
LGYFGLEEPKTKDTRVLEAYKKRVYHMLAIVGQIRQCVFHDLSEHSEYDLYSFIDNSKKVYRECRETLDYLVDERFDSINKGFI
QGNKVNISLLIDMMKGYEADDIIRLYYDFIVLKSQKNLGFSIKKLREKILDEYGFRFKDKQYDSVRSKMYKLMDFLLFCNYYRN
DIAAGESLVRKLRFSMTDDEKEGIYADEAAKLWGKFRNDFENIADHMNGDVIKELGKADMDFDEKILDSEKKNASDLLYFSKMI
YMLTYFLDGKEINDLLTTLISKFDNIKEFLKIMKSSAVDVECELTAGYKLFNDSQRITNELFIVKNIASMRKPAASAKLTMFRD
ALTILGIDDKITDDRISEILKLKEKGKGIHGLRNFITNNVIESSRFVYLIKYANAQKIREVAKNEKVVMFVLGGIPDTQIERYY
KSCVEFPDMNSSLEAKRSELARMIKNIRFDDFKNVKQQAKGRENVAKERAKAVIGLYLTVMYLLVKNLVNVNARYVIAIHCLER
DFGLYKEIIPELASKNLKNDYRILSQTLCELCDNGDESPNLFLKKNKRLRKCVEVDINNADSNMTRKYRNCIAHLTVVRELKEY
IGDIRTVDSYFSIYHYVMQRCITKREDDTKQEEKIKYEDDLLKNHGYTKDFVKALNSPFGYNIPRFKNLSIEQLFDRNEYLTEK
(SEQ ID NO: 267)
>OHCE01000125_17
[human gut metagenome]
MAKKNKMKPRERREAQKKARQLKAAEINNNAVPAIAAMPAAEAAAPAAEKKKSSVKAAGMKSILVSENKMYITSFGKGNSAVLE
YEVDNNDYNKTQLSSKDNSNIELCDVGKVNITFSSRRGFESGVEINTSNPTHRSGESSSVRGDMLGLKSELEKRFFGKNFDDNI
HIQLIYNILDIEKILAVYVTNIVYALNNMLGEGDESNYDFMGYLSTFNTYKVFTNPNGSTLSDDKKENIRKSLSKFNALLKTKR
LGYFGLEEPKTKDTRASEAYKKRVYHMLAIVGQIRQCVFHDKSGAKRFDLYSFINNIDPEYRETLDYLVDERFDSINKGFIQGN
KVNISLLIDMMKGYEADDIIRLYYDFIVLKSQKNLGFSIKKLREKMLEEYGYRFKDKQYDSVRSKMYKLMDFLLFCNYYRNDVV
AGEALVRKLRFSMTDDEKEGIYADEASKLWGKFRNDFENIADHMNGDVIKELGKADMDFDEKILDSEKKNASDLLYFSKMIYML
TYFLDGKEINDLLTTLISKFDNIKEFLKIMKSSAVDVECELTAGYKLFNDSQRITNELFIVKNIASMRKPASSAKLTMFRDALT
ILGIDDNITDDRISEILKLKEKGKGIHGLRNFITNNVIESSRFVYLIKYANAQKIRKVAKNEKVVMFVLGGIPDTQIERYYKSC
VEFPDMNSSLEVKRSELARMIKNISFDDFKNVKQQAKGRENVAKERAKAVIGLYLTVMYLLVKNLVNVNARYVIAIHCLERDFG
LYKEIIPELASKNLKNDYRILSQTLCELCDESPNLFLKKNERLRKCVEVDINNADSSMTRKYRNCIAHLTVVRELKEYIGDIRT
VDSYFSIYHYVMQRCITKREDDKKQEEKIKFEDDLLKNHGYTKDFVKALNSPFGYNIPRFKNLSIEQLFDRNEYLTEK (SEQ
ID NO: 268)
>OHCH01000211_3
[human gut metagenome]
MAKKNKMKPRELREAQKKARQFKAAEINNNAVPAIAAMPAAEAAAPAAEKKKSSVKAAGMKSILVSENKMYITSFGKGNSAVLE
YEVDNNDYNKTQLSSEDSSNIELCGVNEVNITFSSKHGFESGVEINTSNPTHRSGESSPVRGDMLGLKSELEKRFFGKTFDDNI
HIQLIYNILDIEKILAVYVTNIVYALNNMLGVKGSESHDDFIGYLSTNNIYDVFIDPDNSSLSDDKKANVRKSLSKFNALLKTK
RLGYFGLEEPKTKDTRASEAYKKRVYHMLAIVGQIRQCVFHDKSGAKRFDLYSFINNIDPEYRDTLDYLVDERFDSINKGFIQG
NKVNISLLIDMMKGYEADDIIRLYYDFIVLKSQKNLGFSIKKLREKMLEEYGYRFKDKQYDSVRSKMYKLMDFLLFCNYYRNDV
VAGEALVRKLRFSMTDDEKEGIYADEAAKLWGKFRNDFENIADHMNGDVIKELGKADMDFDEKILDSEKKNASDLLYFSKMIYM
LTYFLDGKEINDLLTTLISKFDNIKEFLKIMKSSAVDVECELTAGYKLFNDSQRITNELFVVKNIASMRKPAASAKLTMFRDAL
TILGIDDKITDDRISEILKLKEKGKGIHGLRNFITNNVIESSRFVYLIKYANAQKIREVAKNEKVVMFVLGGIPDTQIERYYKS
CVEFPDMNSSLEAKRSELARMIKNISFDDFKNVKQQAKGRENVAKERAKAVIGLYLTVMYLLVKNLVNVNARYVIAIHCLERDF
GLYKEIIPELASKNLKNDYRILSQTLCELCDDRDESPNLFLKKNERLRKCVEVDINNADSSMTRKYRNCIAHLTVVRELKEYIG
DIRTVDSYFSIYHYVMQRCITKREDDTKQEEKIKYEDDLLKNHGYTKDFVKALNSPFGYNIPRFKNLSIEQLFDRNEYLTEK
(SEQ ID NO: 269)
>OHCP01000044_27
[human gut metagenome]
MAKKITAKQKREEKERLNKQKWAKNDSVIIVPETKEEIKTGEIQDNNRKRSRQKSQAKAMGLKAVLSFDNKIAIASFVSSKNAK
SSHIERITDKEGTTISVNSKMFESSVNKRDINIEKRITIEEPQQDGTIKKEEKGVKSTTCNPYFKVGGKDYIGIKEIAEEHFFG
RAFPNENLRVQIAYNIFDVQKILGTFVNNIIYSFYNLSRDEVQSDNDVIGMLYSISDYDRQKETETFLQAKSLLKQTEAYYAYF
DDVFKKNKKPDKNKEGDNSKQYQENLRHNFNILRVLSFLRQICMHAEVHVSDDEGCTRTQNYTDSLEALFNISKAFGKKMPELK
TLIDNIYSKGINAINDEFVKNGKNNLYILSKVYPNEKREVLLREYYNFVVCKEGSNIGISTRKLKETMIAQNMPSLKEENTYRN
KLYTVMNFILVRELKNCATIREQMIKELRANMDEEEGRDRIYSKYAKEIYLYVKDKLKLMLNVFKEEAEGIIIPGKEDPVKFSH
GKLDKKEIESFCLTTKNTEDITKVIYFLCKFLDGKEINELCCAMMNKLDGISDLIETAKQCGEDVEFVDQFKCLSKCATMSNQI
RIVKNISRMKKEMTIDNDTIFLDALELLGRKIEKYQKDKNGDYVKDEKGKKVYTKDYNNFQDMFFEGKNHRVRNFVSNNVIKSK
WFSYVVRYNKPAECQALMRNSKLVKFALDELPDSQIEKYYISVFGEKSSSSNEEMRRELLKKLCDFSVRGFLDEIVLLSEDEMK
QKDKFSEKEKKKSLIRLYLTIVYLITKSMVKINTRFSIACATYERDYILLCQSEKAERAWEKGATAFALTRKFLNHDKPTFEQY
YTREREISAMPQEKRKELRKENDQLLKKTHYSKHAYCYIVDNVNNLTGAVANDNGRGLPCLSEKNDNANLFLEMRNKIVHLNVV
HDMVKYINEIKNITSYYAFFCYVLQRMIIGNNSNEQNKFKAKYSKTLQEFGTYSKDLMWVLNLPFAYNLPRYKNLSNEQLFYDE
EERMEKIVGRKNDSR (SEQ ID NO: 270)
>OHCW01000317_3
[human gut metagenome]
MAKKNKMKPRELREAQKKARQLKAAEINNNAAPAIAAMPVAEAAAPAAEKKKSSVKAAGMKSILVSENKMYITSFGKGNSAVLE
YEVDNNDYNKTQLSSKDNSNIELGDVNEVNITFSSKHGFESGVEINTSNPTHRSGESSPVRGDMLGLKSELEKRFFGKTFDDNI
HIQLIYNILDIEKILAVYVTNIVYALNNMLGEGDESNYDFMGYLSTFNTYKVFTNPNGSTLSDDKKENIRKSLSKFNALLKTKR
LGYFGLEEPKTKDTRVLEAYKKRVYYMLAIVGQIRQCVFHDLSEHSEYDLYSFIDNSKKVYRECRETLDYLVDERFDSINKGFI
QGNKVNISLLIDMMKGYEPDDIIRLYYDFIVLKSQKNLGFSIKKLREKMLDEYGFRFKDKQYDSVRSKMYKLMDFLLFCNYYRN
DVAAGEALVRKLRFSMTDDEKEGIYADEAAKLWGKFRNDFENIADHMNGDVIKELGKADMNFDEKILDSEKKNASDLLYFSKMI
YMLTYFLDGKEINDLLTTLISKFDNIKEFLKIMKSSAVDVECELTAGYKLFNDSQRITNELFIVKNIASMRKPAASAKLTMFRD
ALTILGIDDKITDDRISEILKLKEKGKGIHGLRNFITNNVIESSRFVYLIKYANAQKIREVAKNEKVVMFVLGGIPDTQIERYY
KSCVEFPDMNSSLEAKRSELARMIKNISFDDFKNVKQQAKGRENVAKERAKAVIGLYLTVMYLLVKNLVNVNARYVIAIHCLER
DFGLYKEIIPELASKNLKNDYRILSQTLCELCDKSPNLFLKKNERLRKCVEVDINNADSSMTRKYRNRIAHLTVVRELKEYIGD
IRTVDSYFSIYHYVMQRCITKREDDTKQGEKIKYEDDLLKNHGYTKDFVKALNSPFGYNIPRFKNLSIEQLFDRNEYLTEK
(SEQ ID NO: 271)
>OHDP01000241_4
[human gut metagenome]
MGKKIHARDLREQRKTDRTEKFADQNKKREAERAVPKKDAAVSVKSVSSVSSKKDNVTKSMAKAAGVKSVFAVENTVYMTSFGR
GNDAVLEQKIVDTSHEQLNIDDPAYQLNVVTMNGYSVTGHRGETVSAVTDNPLRRFNGGKKDEPEQSVPTDMLCLKPTLEKKFF
GKEFNDNIHIQLIYNILDIEKILAVYSTNAIYALNNMSADENIENSDFFMKRTTDETFDDFEKKKESTNSREKADFDAFEKFIG
NYRLAYFADAFYVNKKNPKGKAKNVLREDKELYSVLTLIGKLRHWCVHSEDGRAEFWLYKLDELKDDFKNVLDVVYNRPVEEIN
NRFIENNKVNIQILGSVYKNTDIAELVRSYYEFLITKKYKNMGFSIKKLRESMLEGKGYADKEYDSVRNKLYQMTDFILYTGYI
NEDSDRADDLVNTLRSSLKEDDKTTVYCKEADYLWKKYRESIREVADALDGDNIKRLSKSNIEIQEDKLRKCFISYADSVSEFT
KLIYLLTRFLSGKEINDLVTTLINKFDNIRSFLEIMDELGLDRTFTAEYSFFEGSTKYLAELVELNSFVKSCSFDINAKRTMYR
DALDILGIKSGKTEEDIEKMIDNILQIDANGDKKLKKNNGLRNFIASNVIDSNRFKYLVRYGNPKKIRETAKCKPAVRFVLNEI
PDAQIERYYEACCPKNTALCSANKRREKLADMIAEIKFENFSDAGNYQKANVTSRTSEAEIKRKNQAIIRLYLTVMYIMLKNLV
NVNARYVIAFHCVERDTKLYAESGLEVGNIEKNKTNLTMAVMGVKLENGIIKTEFDKSLAENAANRYLRNARWYKLILDNLKKS
ERAVVNEFRNTVCHLNAIRNININIDGIKEVENYFALYHYLIQKHLENRFADKKVERDTGDFISKLEEHKTYCKDFVKAYCTPF
GYNLVRYKNLTIDGLFDKNFPGKDDSDEQK (SEQ ID NO: 272)
>OHDT01000502_2
[human gut metagenome]
MAKKNKMKPRELREAQKKARQLKAAEINNNAAPAIAAMPAAQVIAPAAEKKKSSVKAAGMKSILVSENKMYITSFGKGNSAVLE
YEVDKVDNNNYNKTQLSSKDNSNIELGDVNEVNITFSSKHGFESGVEINTSNPTHRSGESSPVRWDMLGLKSELEKRFFGKTFD
DNIHIQLIYNILDIEKILAVYVTNIVYALNNMLGIKGSESYDDFMGYLSARNTYEVFTHPDKSNLSDKVKGNIKKSLSKFNDLL
KTKRLGYFGLEEPKTKDTRVSQAYKKRVYHMLAIVGQIRQSVFHDKSSKLDEDLYSFIDIIDSEYRETLDYLVDERFDSINKGF
IQGNKVNISLLIDMMKGYEADDIIRLYYDFIVLKSQKNLGFSIKKLREKMLDEYGFRFKDKQYDSVRSKMYKLMDFLLFCNYYR
NDVVAGEALVRKLRFSMTDDEKEWIYADEAEKLWGKFRNDFENIADHMNGDVIKELGKADMDFDEKILDSEKKNASDLLYFSKM
IYMLTYFLDGKEINDLLTTLISKFDNIKEFLKIMKSSAVDVECELTASYKLFNDSQRITNELFIVKNIASMRKPAASAKLTMFR
DALTILGIDDKITDDRISEILKLKEKGKGIHGLRNFITNNVIESSRFVYLIKYANAQKIREVAENEKVVMFVLGGIPDTQIERY
YKSCVEFPDMNSSLEVKRSELARMIKNISFDDFKNVKQQAKGRENVAKERAKAVIGLYLTVMYLLVKNLVNVNARYVIAIHCLE
RDFGLYKEIIPELASKNLKNDYRILSQTLCELCDDRDESPNLFLKKNKRLRKCVEVDINNADSSMTRKYRNCIAHLTVVRELKE
YIGDIRTVDSYFSIYHYVMQRCITKREDDKKQEEKIKYEDDLLKNHGYTKDFVKALNSPFGYNIPRFKNLSIEQLFDRNEYLTE
K (SEQ ID NO: 273)
>OHFA01000290_5
[human gut metagenome]
MGKKIHARDLREQRKTDRTVKFADQNKKREAERAVQKKDAAVSVKSVPSVSSKKDNVTKSMAKAAGVKSVFAVGNTVYMTSFGR
GNDAVLEQKIVDTSHEPLNIDDPAYQLNVVTMNGYSVIGHRGETVSAVTDNPLRRFNGGKKDEPEQSVPTDMLCLKPTLEKKFF
GKEFDDNIHIQLIYNILDIEKILAVYSTNAIYALNNMSADENIENSDFFMKRTTDETFDDFEKKKESTNSREKADFDAFEKFIG
NYRLAYFADAFYVNKKNPKGKAKNVLREDKELYSVLTLIGKLRHWCVHSEEGRAEFWLYKLDELKDDFKNVLDVVYNRPVEEIN
NRFIENNKVNIQILGSVYKNTDIAELVRSYYEFLITKKYKNMGFSIKKLRESMLEGKGYADKEYDSVRNKLYQMTDFILYTGYI
NEDSDRADDLVNTLRSSLKEDDKTTVYCKEADYLWKKYRESIREVADALDVDNIKNLSGSNIEIRDNELRKCFISYADSVSEFT
KLIYLLTRFLSGKEINDLVTTLINKFDNIRSFLEIMDELGLDRTFTAEYSFFEDSTKYLAELVELNSFVKSCSFDINAKRTMYR
DALDILGIKSGKTEEDIEKMIDNILQIDANGDKKLKKNNGLRNFIASNVIDSNRFKYLVRYGNPKKIRETAKCKPAVRFVLNEI
PDAQIERYYEACCPENTALCSANKKREKLADMIAEIEFENFSDAGNYQKANVTSKTHEAEIKRKNQSIIRLYLTVMYIMLKNLV
NVNARYVIAFHCVERDTKLYAESGLEVGNIEKNKTNLTMAVMGVKLENGIIKTEFDKSLAENAANRYLRNARWYKLILDNLKKS
ERAVVNEFRNTVCHLNAIRNININIKEIKEVENYFALYHYLIQKHLENRFADKKVERDTGDFISKLEEHKTYCKDFVKAYCTPF
GYNLVRYKNLTIDGLFDKNYPGKDDSDEQK (SEQ ID NO: 274)
>OHGX01000264_3
[human gut metagenome]
MAKKNKMKPRELREAQKKARQLKAAEINNNAAPAIAAMPAAQVIAPAAEKKKSSVKAAGMKSILVSENKMYITSFGKGNSAVLE
YEVDKVDNNNYNKTQLSSKDNSNIELGDVNEVNITFSSKHGFESGVEINTSNPTHRSGESSSVRGDMLGLKSELEKRFFGKTFD
DNIHIQLIYNILDIEKILAVYVTNIVYALNNMLGVKGSESYDDFMGYLSAQNTYYIFTHPDKSNLSDKVKGNIKKSLSKFNDLL
KTKRLGYFGLEEPKTKDKRVSEAYKKRVYHMLAIVGQIRQSVFHDKSNELDEYLYSFIDIIDSEYRDTLDYLVDERFDSINKGF
VQGNKVNISLLIDMMKGYEADDIIRLYYDFIVLKSQKNLGFSIKKLREKMLDEYGFRFKDKQYDSVRSKMYKLMDFLLFCNYYR
NDIAAGEALVRKLRFSMTDDEKEGLYADEAAKLWGKFRNDFENIADHMNGDVIKELGKADMDFDEKILDSEKKNASDLLYFSKM
IYMLTYFLDGKEINDLLTTLISKFDNIKEFLKIMKSSAVNVECELTAGYKLFNDSQRITNELFIVKNIASMRKPAASAKLTMFR
DALTILGIDDNITDDRISEILKLKEKGKGIHGLRNFITNNVIESSRFVYLIKYANAQKIREVAKNEKVVMFVLGGIPDTQIERY
YKSCVEFPDMNSSLEVKRSELARMIKNIRFDDFKNVKQQAKGRENVAKERAKAVIGLYLTVMYLLVKNLVNVNARYVIAIHCLE
RDFGLYKEIIPELASKNLKNDYRILSQTLCELCDNRDESPNLFLKKNKRLRKCVEVDINNADSSMTRKYRNCIAHLTVVRELKE
YIGDIRTVDSYFSIYHYVMQRCITKREDDTKQEDKIKYEDDLLKNHGYTKDFVKALNSPFGYNIPRFKNLSIEQLFDRNEYLTE
K (SEQ ID NO: 275)
>OHIB01002708_3
[human gut metagenome]
MAKKNKMKPRELREAQKKARQLKAAEINNNAAPAIAAMPAAQVIAPAAEKKKSSVKAAGMKSILVSENKMYITSFGKGNSAVLE
YEVDKVDNNNYNKTQLSSKDNSNIELGDVNEVNITFSSKHGFESGVEINTSNPTHRSGESSPVRWDMLGLKSELEKRFFGKTFD
DNIHIQLIYNILDIEKILAVYVTNIVYALNNMLGIKGSESYDDFMGYLSARNTYEVFTHPDKSNLSDKVKGNIKKSLSKFNDLL
KTKRLGYFGLEEPKTKDTRVSQAYKKRVYHMLAIVGQIRQSVFHDKSSKLDEDLYSFIDIIDSEYRETLDYLVDERFDSINKGF
IQGNKVNISLLIDMMKGYEADDIIRLYYDFIVLKSQKNLGFSIKKLREKMLDEYGFRFKDKQYDSVRSKMYKLMDFLLFCNYYR
NDVVAGEALVRKLRFSMTDDEKEWIYADEAEKLWGKFRNDFENIADHMNGDVIKELGKADMDFDEKILDSEKKNASDLLYFSKM
IYMLTYFLDGKEINDLLTTLISKFDNIKEFLKIMKSSAVDVECELTASYKLFNDSQRITNELFIVKNIASMRKPAASAKLTMFR
DALTILGIDDKITDDRISEILKLKEKGKGIHGLRNFITNNVIESSRFVYLIKYANAQKIREVAENEKVVMFVLGGIPDTQIERY
YKSCVEFPDMNSSLEVKRSELARMIKNISFDDFKNVKQQAKGRENVAKERAKAVIGLYLTVMYLLVKNLVNVNARYVIAIHCLE
RDFGLYKEIIPELASKNLKNDYRILSQTLCELCDDRDESPNLFLKKNKRLRKCVISIMQTAA (SEQ ID NO: 276)
>OHJK01001285_9
[human gut metagenome]
MGKKIHARDLREQRKNDRTAKFAVQNKKCEAQRAVQKKDAAVSAKSVSSVSSKKDNATKSMAKAAGVKSVFAVGNTVYMTSFGR
GNDAVLEQKIVDTSHEPLNIDDPAYQLNVVTMNGYSVTGHRGETVSAVTDNPLRRFNGGKKDEPEQSVPTDMLCLKPTLEKKFF
GKEFNDNIHIQLIYNILDIEKILAVYSTNAVYALNNTIADENDENWDLFANFSTDNTYYELRNAAAYKESADDESTDDEKRREA
EKKKREAKKAEKILADYEKFRKNNRLAYFADAFYVDKNKSKSKSKDKAEGIQRGKKEIYSILALIAKLRHWCVHSEDGRAEFWL
YKLDELKDDFKNVLDVVYNRPVEEINNRFIENNKVNIQILDSVYENTDIAELTRSYYEFLITKKYKNMGFSIKKLRESMLEGKG
YADKEYDSVRNKLYQMTDFILYTGYINEDSDRADDLVNTLRSSLKEDDKTTVYCKEADYLWKKYRESIREVADALDGDNIKKLS
KSNIEIQEDKLRKCFISYADSVSEFTKLIYLLTRFLSGKEINDLVTTLINKFDNIRSFLEIMDELGLDRTFTAEYSFFEGSTKY
LAELVELNSFVKSCSFDMSAKRTMYRDALDILGIESDKTEEDIEKMIDNILQVDANGKKLPNKNHGLRNFIASNVIDSNRFEYL
VRYGNPKKIRETAKCEPAVRFVLNEIPDAQIERYYKAYYPDEKSLCLANMQRDKLADMIAEIKFENFSDAGSYQEANATSTRIT
SEAEIKRKNQAIIRLYLTVMYIMLKNLVNVNARYVIAFHCLERDAKLYSESVLKVGNTNEESRLQTGNTNEEKNKVKLTNLTNL
TMAVMGVKLENGTIKTEFDKSLAENAANRYLRNARWYKLILDNLKKSERAVVTEFRNTVCHLNAIRNININIKEVKEVENYFAL
YHYLIQKHLEKRFADKKVERDTGDFISKLEEHKTYCKDFVKAYCTPFGYNLVRYKNLTIDGLFDKNYPGKDDSDEQK (SEQ
ID NO: 277)
>OHJS01001864_3
[human gut metagenome]
MAKKNKMKPRERREAQKKARQLKAAEINNNAVPAIAAMPAAEAAAPAAEKKKSSVKAAGMKSILVSENKMYITSFGKGNSAVLE
YEVDNNDYNKTQLSSKDNSNIELCDVDEVNITFSSKHGFESGVKINTSNPTHRSGESSSVRGDMLGLKSELEKRFFGKTFDDNI
HIQLIYNILDIEKILAVYVTNIVYALNNMLGLENESNNDFMGYLSAKNTYDVFTDPDESDLSKNIKGNIKKSLSKFNDLLKTKR
LGYFGLEEPKTKDKRVSEAYKKRVYHMLAIVGQIRQSVFHDKSNELDEYLYSFIDIIDSEYRETLDYLIDERFDSINKGFIQGN
KVNISLLIDMMKGYEADDIIRLYYDFIVLKSQKNLGFSIKKLREKMLEEYGYRFKDKQYDSVRSKMYKLMDFLLFCNYYRNDVV
AGEALVRKLRFSMTDDEKEGIYADEAAKLWGKFRNDFENIADHMNGDVIKELGKADMDFDEKILDSEKKNASDLLYFSKMIYML
TYFLDGKEINDLLTTLISKFDNIKEFLKIMKSSAVNVECELTAGYKLFNDSQRITNELFIVKNIASMRKPAASAKLTMFRDALT
ILGIDDKITDDRISEILKLKEKGKGIHGLRNFITNNVIESSRFVYLIKYANAQKIREVAKNEKVVMFVLGGIPDTQIERYYKSC
VEFPDMNSSLEVKRSELARMIKNISFDDFKNVKQQAKGRENVAKERAKAVIGLYLTVMYLLVKNLVNVNARYVIAIHCLERDFG
LYKEIIPELASKNLKNDYRILSQTLCELCDNRDESPNLFLKKNKRLRKCVEVDINNADSSMTRKYRNCIAHLTVVRELKEYIGD
IRTVDSYFSIYHYVMQRCITKREDDKKQEEKIKFEDDLLKNHGYTKDFVKALNSPFGYNIPRFKNLSIEQLFDRNEYLTEK
(SEQ ID NO: 278)
>OHJT01001977_4
[human gut metagenome]
MGKKIHARDLRERRKTDRTEKFADQNKKREAERAVQKKDAAVSVKSVSSVSSKKDNVTKSMAKAAGVKSVFAVGNTVYMTSFGR
GNDAVLEQKIVDTSHEPLNIDDPAYQLNVVTMNGYSVTGHRGETVSAVTDNPLRRFNGGKKDEPEQSVPTDMLCLKPTLEKKFF
GKEFDDNIHIQLIYNILDIEKILAVYSTNAIYALNNMSADENIESSDFFMKRTTDETFDDFEKKKESTNSREKADFDAFEKFIG
NYRLAYFADAFYVNKKNPKGKARNVLREDKELYSVLTLIGKLRHWCVHSEEGRAEFWLYKLDELKDDFKNVLDVVYNRPVEEIN
NRFIENNKVNIQILGSVYKNTDIAELVRSYYEFLITKKYKNMGFSIKKLRESMLEGKGYADKEYDSVRNKLYQMTDFILYTGYI
NEDSDRADDLVNTLRSSLKEDDKTTVYCKEADYLWKKYRESIREVADALDGDNIKRLSKSNIEIQEDKLRKCFISYADSVSEFT
KLIYLLTRFLSGKEINDLVTTLINKFDNIRSFLEIMDELGLDRTFTAEYSFFEGSTKYLAELVELNSFVKSCSFDINAKRTMYR
DALDILGIKSGKTEEDIEKMIDNILQIDANGDKKLKKNNGLRNFIASNVIDSNRFKYLVRYGNPKKIRETAKCKPAVRFVLNEI
PDAQIERYYEACCPKNTALCSANKRREKLADMIAEIEFENFSDAGNYQKANVTSRTSEAEIKRKNQAIIRLYLTVMYIMLKNLV
NVNARYVIAFHCVERDTKLYAESGLEVGNIEKNKTNLTMAVMGVKIENGIIKTEFDKSLAENAANRYLRNARWYKLILDNLKKS
ERAVVNEFRNTVCHLNAIRNININIDGIKEVENYFALYHYLIQKHLENRFADKKVERDTGDFISKLEEHKTYCKDFVKAYCTPF
GYNLVRYKNLTIDGLFDKNYPGKDDSDKQK (SEQ ID NO: 279)
>OHMF01000395_24
[human gut metagenome]
MAKKNKMKPRELREAQKKARQLKAVEINNNAVPEIAAMPAAEVIAPVAEKKKSSVKAAGMKSILVSENKMYITSFGKGNSAVLE
YEVDNNDYNKTQLSSKNSSNIELRGVNEVNITFSSKHGFESGVEINTSNPTHRSGESSPVRWDMLGLKSELEKRFFGKTFDDNI
HIQLIYNILDIEKILAVYVTNIVYALNNMLGIKGSESYDDFMGYLSARNTYEVFTHPDKSSLSDDKKANVRKSLSKFNVLLKTK
RLGYFGLEEPKTKDTRVSQAYKKRVYHMLAIVGQIRQSVFHDKSSKLHEDLYSFIDIIDSEYRETLDYLVDERFDSINKGFIQG
NKVNISLLIDMMKDDYEADDIIRLYYDFIVLKSQKNLGFSIKKLREKMLDEYGFRFKDKQYDSVRSKMYKLMDFLLFCNYYRND
VIAGEALVRKLRFSMTDDEKEGIYADEAAKLWGKFRNDFENIADHMNGDVIKELGKADMDFDEKILDSEKKNASDLLYFSKMIY
MLTYFLDGKEINDLLTTLISKFDNIKEFLKIMKSSAVDVECELTAGYKLFNDSQRITNELFIVKNIASMRKPAASAKLTMFRDA
LTILGIDDNITDDRISEILKLKEKGKGIHGLRNFITNNVIESSRFVYLIKYANAQKIREVAKNEKVVMFVLGGIPDTQIERYYK
SCVEFPDMNSSLEAKRSELARMIKNISFDDFKNVKQQAKGRENVAKERAKAVIGLYLTVMYLLVKNLVNVNARYVIAIHCLERD
FGLYKEIIPELASKNLKNDYRILSQTLCELCDNGDESPNLFLKKNKRLRKCVEVDINNADSSMTRKYRNCIAHLTVVRELKEYI
GDIRTVDSYFSIYHYVMQRCITKRENDTKQEDKIKYEDDLLKNHGYTKDFVKALNSPFGYNIPRFKNLSIEQLFDRNEYLTEK
(SEQ ID NO: 280)
>OHUY01000263_2
[human gut metagenome]
MAKKNKMKPRELREAQKKARQLKAAEINNNAAPAIAAMPAAEVIAPAAEKKKSSVKAAGMKSILVSKNKMYITSFGKGNSAVLE
YEVDNNNYNKTQLSSKDNSNIELGDVDEVNITFSSKHGFGSGVEINTSNPTHRSGESSPVRWDMLGLKSELEKRFFGKTFDDNI
HIQLIYNILDIEKILAVYVTNIVYALNNMLGIKDSESYDDFMGYLSARNTYEVFTHPDKSNLSDKVKGNIKKSFSTFNDLLKTK
RLGYFGLEEPKTKDTRVSQAYKKRVYHMLAIVGQIRQSVFHDKSSKLDEDLYSFIDIIDSEYRETLDYLVDERFDSINKGFIQG
NKVNISLLIDMMKGFEADDIIRLYYDFIVLKSQKNLGFSIKKLREKMLDEYGFRFKDKQYDSVRSKMYKLMDFLLFCNYYRNDV
VAGEALVRKLRFSMTDDEKEGIYADEAEKLWGKFRNDFENIADHMNGDVIKELGKADMDFDEKILDSEKKNASDLLYFSQMIYM
LTYFLDGKEINDLLTTLISKFDNIKEFLKIMKSSAVDVECELTAGYKLFNDSQRITNELFIVKNIASMRKPAASAKLTMFRDAL
TILGIDDNITDDRISEILKLKEKGKGIHGLRNFITNNVIESSRFVYLIKYANAQKIREVAKNEKVVMFVLGGIPDTQIERYYKS
CVEFPDMNSSLEAKRSELARMIKNIRFDDFKNVKQQAKGRENVAKERAKAVIGLYLTVMYLLVKNLVNVNARYVIAIHCLERDF
GLYKEIIPELASKNLKNDYRILSQTLCELCDKSPNLFLKKNERLRKCVEVDINNADSSMTRKYRNCIAHLTVVRELKEYIGDIR
TVDSYFSIYHYVMQRCITKRENDTKQEDKIKYEDDLLKNHGYTKDFVKALNSPFGYNIPRFKNLSIEQLFDRNEYLTEK (SEQ
ID NO: 281)
>OIBN01003740_1
[human gut metagenome]
MAKKNKMKPRELREAQKKARQLKAAEINNNAAPAIAAMPAAEVIAPAAEKKKSSVKAAGMKSILVSENKMYITSFGKGNSAVLE
YEVDNNDYNQTQLSSKDNSNIQLGGVNEVNITFSSKHGFESGVEINTSNPTHRSGESSPVRGDMLGLKSELEKRFFGKTFDDNI
HIQLIYNILDIEKILAVYVTNIVYALNNMLGVKGSESHDDFIGYLSTNNIYDVFIDPDNSSLSDDKKANVRKSLSKFNALLKTK
RLGYFGLEEPKTKDNRVSQAYKKRVYHMLAIVGQIRQCVFHDKSGAKRFDLYSFINNIDPEYRDTLDYLVEERLKSINKDFIED
NKVNISLLIDMMKGYEADDIIRLYYDFIVLKSQKNLGFSIKKLRDKMLDEYGFRFKDKQYDSVRSKMYKLMDFLLFCNYYRNDI
AAGESLVRKLRFSMTDDEKEGIYADEAAKLWGKFRNDFENIADHMNGDVIKELGKADMDFDEKILDSEKKNASDLLYFSKMIYM
LTYFLDGKEINDLLTTLISKFDNIKEFLKIMKSSAVDVECELTAGYKLFNDSQRITNELFIVKNIASMRKPAASAKLTMFRDAL
TILGIDDKITDDRISGILKLKEKGKGIHGLRNFITNNVIESSRFVYLIKYANAQKIREVAKNEKVVMFVLGGIPDTQIERYYKS
CVEFPDMNSSLGVKRSELARMIKNISFDDFKNVKQQAKGRENVAKERAKAVIGLYLTVMYLLVKNLVNVNARYVIAIHCLERDF
GLYKEIIPELASKNLKNDYRILSQTLCELCDKSPNLFLKKNERLRKCVEVDINNADSSMTRKYRNCIAHLTVVRELKEYIGDIC
TVDSYFSIYHYVMQRCITKRENDTKQEEKIKYEDDLLKNHGYTKDFVKALNSPFGYNIPRFKNLSIEQLFDRNEYLTEK (SEQ
ID NO: 282)
>OIEE01000042_11
[human gut metagenome]
MAKKNKMKPRELREAQKKARQLKAAEINNNAAPAIAAMPAAEVIAPAAEKKKSSVKAAGMKSILVSENKMYITSFGKGNSAVLE
YEVDNNDYNKTQLSSKDNSNIELGDVNEVNITFSSKHGFGSGMKINTSNPTHRSGESSPVRWDMLGLKSELEKRFFGKTFDDNI
HIQLIYNILDIEKILAVYVTNIVYALNNMLGVKGSESHDDFIGYLSTNNIYDVFIDPDNSSLSDDKKANVRKSLSKFNVLLKTK
RLGYFGLEEPKTKDNRVSEAYKKRVYHMLAIVGQIRQCVFHDKSGAKRFDLYSFINNIDPEYRDTLDYLVEERLKSINKDFIQG
NKVNISLLIDMMKGYEADDIIRLYYDFIVLKSQKNLGFSIKKLREKMLEEYGFRFKDKQYDSVRSKMYKLMDFLLFCNYYRNDV
VAGEALVRKLRFSMTDDEKEGIYADEAAKLWGKFRNDFENIADHMNGDVIKELGKADMDFDEKILDSEKKNASDLLYFSKMIYM
LTYFLDGKEINDLLTTLISKFDNIKEFLKIMKSSAVDVECELTAGYKLFNDSQRITNELFIVKNIASMRKPAASAKLTMFRDAL
TILGIDDNITDDRISEILKLKEKGKGIHGLRNFITNNVIESSRFVYLIKYANAQKIREVAKNEKVVMFVLGGIPDTQIERYYKS
CVEFPDMNSSLEAKRSELARMIKNISFDDFKNVKQQAKGRENVAKERAKAVIGLYLTVMYLLVKNLVNVNARYVIAIHCLERDF
GLYKEIIPELASKNLKNDYRILSQTLCELCDDRDESPNLFLKKNKRLRKCVEVDINNADSSMTRKYRNCIAHLTVVRELKEYIG
DIRTVDSYFSIYHYVMQRCITKREDDTKQEDKIKYEDDLLKNHGYTKDFVKALNSPFGYNIPRFKNLSIEQLFDRNEYLTEK
(SEQ ID NO: 283)
>OIEL01000292_3
[human gut metagenome]
MAKKNKMKPRELREAQKKARQLKAAEINNNAAPAIAAMPAAQVIAPAAEKKKSSVKAAGMKSILVSENKMYITSFGKGNSAVLE
YEVDKVDNNNYNKTQLSSKDNSNIELGDVNEVNITFSSKHGFGSGVEINTSNPTHRSGESSPVRWDMLGLKSELEKRFFGKTFD
DNIHIQLIYNILDIEKILAVYVTNIVYALNNMLGEGDDESHDDFMGYLSAQNTYYIFTHPDKSNLSDKVKGNIKKSLSKFNDLL
KTKRLGYFGLEEPKTKDKRVSEAYKKRVYHMLAIVGQIRQSVFHDKSNELDEYLYSFIDIIDSEYRDTLDYLVDERFDSINKGF
VQGNKVNISLLIDMMKGYEADDIIRLYYDFIVLKSQKNLGFSIKKLREKMLDEYGFRFKDKQYDSVRSKMYKLMDFLLFCNYYR
NDVVAGEVLVRKLRFSMTDDEKEWIYADEAEKLWGKFRNDFENIADHMNGDVIKELGKADMDFDEKILDSEKKNASDLLYFSKM
IYMLTYFLDGKEINDLLTTLISKFDNIKEFLKIMKSSAVDVECELTAGYKLFNDSQRITNELFIVKNIASMRKPAASAKLTMFR
DALTILGIDDKITDDRISEILKLKEKGKGIHGLRNFITNNVIESSRFVYLIKYANAQKIREVAENEKVVMFVLGGIPDTQIERY
YKSCVEFPDMNSSLEVKRSELARMIKNISFDDFKNVKQQAKGRENVAKERAKAVIGLYLTVMYLLVKNLVNVNARYVIAIHCLE
RDFGLYKEIIPELASKNLKNDYRILSQTLCELCDDRDESPNLFLKKNKRLRKCVEVDINNADSSMTRKYRNCIAHLTVVRELKE
YIGDIRTVDSYFSIYHYVMQRCITKREDDKKQEEKIKYEDDLLKNHGYTKDFVKALNSPFGYNIPRFKNLSIEQLFDRNEYLTE
K (SEQ ID NO: 284)
>OIEN01002196_3
[human gut metagenome]
MERQKRKMKSKSKMAGVKSVFVIGDELLMTSFGDGDDAVLEKDIDENGVVNDCRNPAAYDAVYGTDSIRVKKTNNNIRAKVNNP
LAKSNIRSEESALFRTRVNEYKREQKDKYETLFFGKTFDDNIHIQLISKILDIEKTFSVVIGNIVYAINNLSLEQSIDRPIDIF
GDKNTQGISLREDNDYLKTMLPRCEYLFHNILNSDSDNNSKMNYNKVNKGKEEKDNRNNENIEKLKKALEVIKIIRVDSFHGVD
GIKGDQKFPRSKYNLAVNYNEEIQKTISEPFNRKVEEVQQDFYRNSCVNIDFLKEIMYGSNYTDRGSDSLECSYFNFAILKQNK
NMGFSITSIRECLLDLYELNFESMQNLRPRANSFCDFLIYDYYCKNESERANLVDCLRSAASEEEKKNIYFQTAERVKEKFRNA
FNRISRFDASYIKNSREKNLSGGSSLPKYSFIEGFTKRSKKINDNDEKNADLFCNMLYYLAQFLDGKEINIFLTSIHNIFQNID
SFLKVMKEKGMECKFQKDFKMFSHAGHVAKKIEIVISLAKMKKTLDFYNAQALKDAVTILGVSKKHQYLDMNSYLDFYMFDNRS
GATGKNAGKDHNLRNFLVSNVIRSRKFNYLSRYSNLAEVKKLAQNPSLVQFVLSRIEPSLICRYYESSQGISSEGITIDEQIKK
LTGIIVDMNIDSFENINNGEIGMRYSKATPQSIERRNQMRVCVGLYLNVLYQIEKNLMNVNARYVLAFAFAERDALMLNFTLEE
CKKNKKRSSGGFSFIEMTQFFIDKKLFKVATEAIKKNVLKYNGNPESLNHIPGEYICKNMEGYHENTVRNFRNMVAHLTAVARV
PLYISEVTQIDSYYALYHYCMQMNILQGIEQSGKILDNIKLKNALENARVHRTYSKDAVKYLCLPFAYNISRYKALTIKDLFDW
TEYSCKKDE (SEQ ID NO: 285)
>OIXA01002812_3
[human gut metagenome]
MAKKNKMKPRELREAQKKARQLKAAEINNNAAPAIAAMPAAEVIAPAAEKKKSSVKAAGMKSILVSENKMYITSFGKGNSAVLE
YEVDNNDYNQTQLSSKDNSNIQLGGVNEVNITFSSKHGFESGVEINTSNPTHRSGESSPVRWDMLGLKSELEKRFFGKTFDDNI
HIQLIYNILDIEKILAVYVTNIVYALNNMLGIKDSESYDDFMGYLSARNTYEVFTHPDKSNLSDKVKGNINKVKCNIKKSFSTF
NDLLKTKRLGYFGLEEPKTKDTRVSQAYKKRVYHMLAIVGQIRQCVFHDKSSKLDEDLYSFIDIIDSEYRETLDYLVDERFDSI
NKGFIQGNKVNISLLIDMMKGYEADDIIRLYYDFIVLKSQKNLGFSIKKLREKMLDEYGFRFKDKQYDSVRSKMYKLMDFLLFC
NYYRNDVVAGEALVRKLRFSMTDDEKEGIYADEAAKLWGKFRNDFENIADHMNGDVIKELGKADMDFDEKILDSEKKNASDLLY
FSKMIYMLTYFLDGKEINDLLTTLISKFDNIKEFLKIMKSSAVDVECELTAGYKLFNDSQRITNELFIVKNIASMRKPAASAKL
TMFRDALTILGIDDNITDDRISEILKLKEKGKGIHGLRNFITNNVIESSRFVYLIKYANAQKIREVAKNEKVVMFVLGGIPDTQ
IERYYKSCVEFPDMNSSLEAKRSELARMIKNISFDDFKNVKQQAKGRENVAKERAKAVIGLYLTVMYLLVKNLVNVNARYVIAI
HCLERDFGLYKEIIPELASKNLKNDYRILSQTLCELCDDRDESPNLFLKKNKRLRKCVEVDINNADSSMTRKYRNCIAHLTVVR
ELKEYIGDIRTVDSYFSIYHYVMQRCITKREDDKKQEEKIKYEDDLLKNHGYTKDFVKALNSPFGYNIPRFKNLSIEQLFDRNE
YLTEK (SEQ ID NO: 286)
>OIXU01000818_5
[human gut metagenome]
MAKKKRITAKERKQNHRESLMKKADSNAEKEKAKKPVVENKPDTAISKDNTPKPNKEIKKSKAKLAGVKWVIKANNDVAYISSF
GKGNNSVLEKRIMGDVSSNVNKDSHMYVNPKYTKKNYEIKNGFSSGSSLVTYPNKPDKNSGMDALCLKPYFEKDFFGHIFTDNM
HIQAIYNIFDIEKILAKHITNIIYTVNSFDRNYNQSGNDTIGFDINYRIPYLKYGGGKDSKGNPKNKSKWKKRENFINFYNEAK
PHLGYYENIFYDHGEPISEEKFYNYLNILNFIRNNTFHYKDNDIELYSENYSEEYVFINCLNEFVKNKFKNVNKNFISNEKNNL
YIILNAYGEDTENVEVVKKYSKELYKLSVLKTNKNLGVNVKKLRESAIENGYCPLPYDKENDVAKLSSVKHKLYKTYDFVITHY
LNSNDKPLLEIVEALRLSKNDDEKEIVYKKYAEKLFKADDVINPIKAISKLFVEKGNKLFREKVRINKEYIEDVSIDKNIYDFT
KVIFFMTCFLDGKEINDLLTNIISKLQIIEDHNNVIKFIAENDDAVYKDYSDKYAIFRNAGKIATELEAIKSIARMENKIENAP
NEPLLKDALLSLGVSDDTKVLENTYKKYFDSKEKTDKQSQKVSTFLMNNVINNNRFKYVIKYINPADINGLAKNRYLVKFVLSK
IPEEQIDSYYKLFSNEEEPSCEEKIKLLTKKISKLNFQTLFENYKIPNVEKEKKKAIITLYFTIVYILVKNLVNINGLYTLALY
FVERDGFFYKDICEKKDKKQLYKDDDYLLLPEIFSGSKYREETKNLKLPKEKDRDIMKKYLPNDEDRKEYNKFFKQYRNNIVHL
NIIAKLSELTKNIDKDINSYFDIYHYCTQRVMFDYCKKNNNVVLAKMKDLAHIKSDCDEFSSKHTYPYSSAVLRFMNLPFAYNV
PRFKNLSYKKFFDKQWLNHYENLNDFIRILY (SEQ ID NO: 287)
>OIXU01000818_6
[human gut metagenome]
MAKKKRITAKERKQNHRESLMKKADSNAEKEKAKKPVVENKPDTAISKDNTPKPNKEIKKSKAKLAGVKWVIKANNDVAYISSF
GKGNNSVLEKRIMGDVSSNVNKDSHMYVNPKYTKKNYEIKNGFSSGSSLVTYPNKPDKNSGMDALCLKPYFEKDFFGHIFTDNM
HIQAIYNIFDIEKILAKHITNIIYTVNSFDRNYNQSGNDTIGFDINYRIPYLKYGGGKDSKGNPKNKSKWKKRENFINFYNEAK
PHLGYYENIFYDHGEPISEEKFYNYLNILNFIRNNTFHYKDNDIELYSENYSEEYVFINCLNEFVKNKFKNVNKNFISNEKNNL
YIILNAYGEDTENVEVVKKYSKELYKLSVLKTNKNLGVNVKKLRESAIENGYCPLPYDKENDVAKLSSVKHKLYKTYDFVITHY
LNSNDKPLLEIVEALRLSKNDDEKEIVYKKYAEKLFKADDVINPIKAISKLFVEKGNKLFREKVRINKEYIEDVSIDKNIYDFT
KVIFFMTCFLDGKEINDLLTNIISKLQIIEDHNNVIKFIAENDDAVYKDYSDKYAIFRNAGKIATELEAIKSIARMENKIENAP
NEPLLKDALLSLGVSDDTKVLENTYKKYFDSKEKTDKQSQKVSTFLMNNVINNNRFKYVIKYINPADINGLAKNRYLVKFVLSK
IPEEQIDSYYKLFSNEEEPSCEEKIKLLTKKISKLNFQTLFENYKIPNVEKEKKKAIITLYFTIVYILVKNLVNINGLYTLALY
FVERDGFFYKDICEKKDKKQLYKDDDYLLLPEIFSGSKYREETKNLKLPKEKDRDIMKKYLPNDEDRKEYNKFFKQYRNNIVHL
NIIAKLSELTKNIDKDINSYFDIYHYCTQRVMFDYCKKNNNVVLAKMKDLAHIKSDCDEFSSKHTYPYSSAVLRFMNLPFAYNV
PRFKNLSYKKFFDKQ (SEQ ID NO: 288)
>OIYU01000175_4
[human gut metagenome]
MAKKNKMKPRELREAQKKARQLKAAEINNNAAPAIAAMPAAQVIAPAAEKKKSSVKAAGMKSILVSENKMYITSFGKGNSAVLE
YEVDKVDNNNYNKTQLSSKDNSNIELCDVGKVNITFSSRRGFESGVEINTSNPTHRSGESSSVRGDMLGLKSELEKRFFGKNFD
DNIHIQLIYNILDIEKILAVYVTNIVYALNNMLGEGDESNYDFMGYLSTFNTYKVFTNPNGSTLSDDKKENIRKSLSKFNALLK
TKRLGYFGLEEPKTKDTRASEAYKKRVYHMLAIVGQIRQCVFHDKSGAKRFDLYSFINNIDPEYRETLDYLVDERFDSINKGFI
QGNKVNISLLIDMMKGYEADDIIRLYYDFIVLKSQKNLGFSIKKLREKMLEEYGYRFKDKQYDSVRSKMYKLMDFLLFCNYYRN
DVVAGEALVRKLRFSMTDDEKEGIYADEASKLWGKFRNDFENIADHMNGDVIKELGKADMDFDEKILDSEKKNASDLLYFSKMI
YMLTYFLDGKEINDLLTTLISKFDNIKEFLKIMKSSAVDVECELTAGYKLFNDSQRITNELFIVKNIASMRKPASSAKLTMFRD
ALTILGIDDNITDDRISEILKLKEKGKGIHGLRNFITNNVIESSRFVYLIKYANAQKIRKVAKNEKVVMFVLGGIPDTQIERYY
KSCVEFPDMNSSLEVKRSELARMIKNISFDDFKNVKQQAKGRENVAKERAKAVIGLYLTVMYLLVKNLVNVNARYVIAIHCLER
DFGLYKEIIPELASKNLKNDYRILSQTLCELCDESPNLFLKKNERLRKCVEVDINNADSSMTRKYRNCIAHLTVVRELKEYIGD
IRTVDSYFSIYHYVMQRCITKREDDKKQEEKIKFEDDLLKNHGYTKDFVKALNSPFGYNIPRFKNLSIEQLFDRNEYLTEK
(SEQ ID NO: 289)
>OIZA01000315_9
[human gut metagenome]
MAKKKRMTAKERKQNHRESLMKKADSNAEKEKAKKPVVENKPDTAISKDNKPKPNKEIKKSKAKLAGVKWIIKANDDVTYISSF
GKGNNSVLEKRIIGDVSGDVNKDSHMYVNPKYTKKNYEIKNGFSSGSSLVTYPNKPDKNSGMDALCLKPYFEIDFFGHIFTDNM
HIQAIYNIFDIEKILAKHITNIIYTVNSFDRNYNQSGNDTIGFDLNYRVPYLEYGGGKDSNGKPNKISAWKKRENFINFYNEAK
PHLGYYENIFYDHGEPISEEKFYNYLNILNFIRNNTFHYKDNDIELYSENYSEEYVFINCLNEFVKNKFKNVNKNFISNEKNNL
YIILKAYGEDTENVEVVKKYSKELYKLSVLKTNKNLGVNVKKLRESAIEYGYCPLPYDKEKEVAKLSSVKHKLYKTYDFVITHY
LNSNDKLLLEIVETLRLSKNDDEKENVYKKYAEKLFKADDVINPIKAISKLFAEKGNKLFKEKIIIKKEYIEDVSIDKNIYDFT
KVIFFMTCFLDGKEINDLLTNIISKLQVIEDHNNVIKFIFHNKDAVYKDYSDKYAIFRNAGKIATELEAIKSIARMENKIENAP
KEPLLKDALLALGVSSNDFDEKYEKYFKTDVDADKDHQKVSTFLMNNVINNSRFKYVVKYINPADINGLAKNRYLVKFVLSKIP
EEQIDSYYKLFSNEEEPSCEEKIKLLTKKISKLNFQTLFENNKIPNVEKERKKAIITLYFTIVYILVKNLVNINGLYTLALYFV
ERDGFFYKQICEKKLIETLKKKDKKQLYNDDDYLLLPEIFSGSKYREETKNLKLPKEKDRDIMKKYLPNDKDREEYNKFFKQYR
NNIVHLKIIAKLSELTKNIDKDINSYFDIYHYCTQRVMFDYCKKNNNVVLAKMKDLAHIKSDCDEFSSKHTYPYSSAVLRFMNL
PFAYNVPRFKNLSYKKFFDKQ (SEQ ID NO: 290)
>OIZI01000180_12
[human gut metagenome]
MAKKKRMTAKERKQNHRDSLMKKADSNAEKEKAKKPVVENKPDTAISKDNKPKPNKEIKKSKAKLAGVKWIIKANDDVAYISSF
GKGNNSVLEKRIMGDVSSNVNKDSHMYVNPKYTKKNYEIKNGFSSGSSLVTYPNKPDKNSGMDALCLKPYFEKDFFGHIFTDNM
HIQAIYNIFDIEKILAKHITNIIYTVNSLDRSYNQSGNDTIGFDLNYCIPYSEYGGGKDSNGKPNKISAWKKRENFIKFYNEAK
PHLGYYENIFYDHGEPISEEKFYNYLNILNFIRNNTFHYKDNDIELYSENYSEEYVFINCLNEFVKNKFKNVNKNFISNEKNNL
YIILNAYGEDTENVEVVKKYSKELYKLSVLKTNKNLGVNVKKLRESAIENGYCPLPYDKENDVAKLSSVKHKLYKTYDFVITHY
LNSNDKPLLEIVEALRLSKNDDEKEIVYKKYAEKLFKADDVINPIKAISKLFVEKGNKLFREKVRINKEYIEDVSIDKNIYDFT
KVIFFMTCFLDGKEINDLLTNIISKLQIIEDHNNVIKFIAENDDAVYKDYSDKYAIFRNAGKIATELEAIKSIARMENKIENAP
NEPLLKDALLSLGVSDDTKVLENTYKKYFDSKEKADKQSQKVSTFLMNNVINNNRFKYVIKYINPADINGLAKNRYLVKFVLSK
IPEEQIDSYYKLFSNEEEHSCEEKIKLLTKKISKLNFQTLFENNKIPNVEKERKKAIITLYFTIVYILVKNLVNINGLYTLALY
FVERDGFFYKQICEKKLIETLKKKDKKQLYKDDDYLLLPEIFSGSKYREETKNLKLPKEKDRDIMKKYLPNDKDREDYNDFFTA
YRNNIVHLNIIAKLSKLTKNIDKDINSYFDIYHYCTQRVMFDYCKKNNNVVLAKMKDLAHIKSDCDEFSSKHTYPYSSAVLRFM
NLPFAYNVPRFKNLSYKKFFDKQWLNHYENLNDFIRILY (SEQ ID NO: 291)
>OIZI01000180_12
[human gut metagenome]
MAKKKRMTAKERKQNHRDSLMKKADSNAEKEKAKKPVVENKPDTAISKDNKPKPNKEIKKSKAKLAGVKWIIKANDDVAYISSF
GKGNNSVLEKRIMGDVSSNVNKDSHMYVNPKYTKKNYEIKNGFSSGSSLVTYPNKPDKNSGMDALCLKPYFEKDFFGHIFTDNM
HIQAIYNIFDIEKILAKHITNIIYTVNSLDRSYNQSGNDTIGFDLNYCIPYSEYGGGKDSNGKPNKISAWKKRENFIKFYNEAK
PHLGYYENIFYDHGEPISEEKFYNYLNILNFIRNNTFHYKDNDIELYSENYSEEYVFINCLNEFVKNKFKNVNKNFISNEKNNL
YIILNAYGEDTENVEVVKKYSKELYKLSVLKTNKNLGVNVKKLRESAIENGYCPLPYDKENDVAKLSSVKHKLYKTYDFVITHY
LNSNDKPLLEIVEALRLSKNDDEKEIVYKKYAEKLFKADDVINPIKAISKLFVEKGNKLFREKVRINKEYIEDVSIDKNIYDFT
KVIFFMTCFLDGKEINDLLTNIISKLQIIEDHNNVIKFIAENDDAVYKDYSDKYAIFRNAGKIATELEAIKSIARMENKIENAP
NEPLLKDALLSLGVSDDTKVLENTYKKYFDSKEKADKQSQKVSTFLMNNVINNNRFKYVIKYINPADINGLAKNRYLVKFVLSK
IPEEQIDSYYKLFSNEEEHSCEEKIKLLTKKISKLNFQTLFENNKIPNVEKERKKAIITLYFTIVYILVKNLVNINGLYTLALY
FVERDGFFYKQICEKKLIETLKKKDKKQLYKDDDYLLLPEIFSGSKYREETKNLKLPKEKDRDIMKKYLPNDKDREDYNDFFTA
YRNNIVHLNIIAKLSKLTKNIDKDINSYFDIYHYCTQRVMFDYCKKNNNVVLAKMKDLAHIKSDCDEFSSKHTYPYSSAVLRFM
NLPFAYNVPRFKNLSYKKFFDKQ (SEQ ID NO: 292)
>OIZU01000200_48
[human gut metagenome]
MAKKNKMKPRELREAQKKARQLKAAEINNNAAPAIAAMPAAQVIAPAAEKKKSSVKAAGMKSILVSENKMYITSFGKGNSAVLE
YEVDKVDNNNYNKTQLSSKDNSNIELGDVNEVNITFSSKHGFESGVEINTSNPTHRSGESSPVRWDMLGLKSELEKRFFGKTFD
DNIHIQLIYNILDIEKILAVYVTNIVYALNNMLGIKGSESYDDFMGYLSARNTYEVFTHPDKSNLSDKVKGNIKKSFSTFNDLL
KTKRLGYFGLEEPKTKDTRVSEAYKKRVYHMLAIVGQIRQCVFHDLSEHSEYDLYSFIDNSKKVYRECRETLNYLVDERFDSIN
KGFIQGNKVNISLLIDMMKDDYEADDIIHLYYDFIVLKSQKNLGFSIKKLREKMLDEYGFRFKDKQYDSVRSKMYKLMDFLLFC
NYYRNDVVAGEALVRKLRFSMTDDEKEGIYADEAEKLWGKFRNDFENIADHMNGDVIKELGKADMDFDEKILDSEKKNASDLLY
FSKMIYMLTYFLDGKEINDLLTTLISKFDNIKEFLKIMKSSAVDVECELTAGYKLFNDSQRITNELFIVKNIASMRKPAASAKL
TMFRDALTILGIDDKITDDRISEILKLKEKGKGIHGLRNFITNNVIESSRFVYLIKYANAQKIREVAKNEKVVMFVLGGIPDTQ
IERYYKSCVEFPDMNSSLKVKRSELARMIKNIRFDDFKNVKQQAKGRENVAKERAKAVIGLYLTVMYLLVKNLVNVNARYVIAI
HCLERDFGLYKEIIPELASKNLKNDYRILSQTLCELCDDRDESPNLFLKKNKRLRKCVEVDINNADSSMTRKYRNCIAHLTVVR
ELKEYIGDIRTVDSYFSIYHYVMQRCITKREDDKKQEEKIKYEDDLLKNHGYTKDFVKALNSPFGYNIPRFKNLSIEQLFDRNE
YLTEK (SEQ ID NO: 293)
>OIZW01000344_20
[human gut metagenome]
MAKKNKMKPRELREAQKKARQLKAAEINNNAAPAIAAMPAAEVIAPAAEKKKSSVKAAGMKSILVSKNKMYITSFGKGNSAVLE
YEVDNNDYNKTQLSSKDNSNIELGNVNEVNITFSSRRGFESGVEINTSNPTHRSGESSSVRGDMLGLKSELEKRFFGKTFDDNI
HIQLIYNILDIEKILAVYVTNIVYALNNMLGVKGSESHDDFIGYLSTNNIYDVFIDPDNSSLSDDKKANVRKSLSKFNALLKTK
RLGYFGLEEPKTKDNRVSEAYKKRVYHMLAIVGQIRQCVFHDKSGAKRFDLYSFINNIDPEYRDTLDYLVEERLKSINKDFIED
NKVNISLLIDMMKGYEADDIIRLYYDFIVLKSQKNLGFSIKKLREKMLDEYGFRFKDKQYDSVRSKMYKLMDFLLFCNYYRNDV
VADEALVRKLRFSMTDDEKEGIYADEAAKLWGKFRNDFENIADHMNGDVIKELGKADMDFDEKILDSEKKNASDLLYFSKMIYM
LTYFLDGKEINDLLTTLISKFDNIKEFLKIMKSSAVDVECELTAGYKLFNDSQRITNELFIVKNIASMRKPAASAKLTMFRDAL
TILGIDDKITDDRISEILKLKEKGKGIHGLRNFITNNVIESSRFVYLIKYANAQKIREVAKNEKVVMFVLGGIPDTQIERYYKS
CVEVSDMNSSLEAKRSELARMIKNIRFDDFKNVKQQANGRENVAKERAKAVIGLYLTVMYLLVKNLVNVNARYVIAIHCLERDF
GLYKEIIPELASKNLKNDYRILSQTLCELCDNGDESPNLFLKKNKRLRKCVEVDINNADSSMIRKYRNCIAHLTVVRELNKYIN
DIYVVNSYFSICHYVMQRCITKRENDTKQEDKIKYEDDLLKNHGYTKDFVKALNSPFGYNIPRFKNLSIKQLFDRNEYLTEK
(SEQ ID NO: 294)
>OIZX01000427_25
[human gut metagenome]
MAKKKKTARQLREEMQQQRKQAIQKQQEQRQEKAAAARETAAPEQPAAAPVPKRQRKSLAKAAGLKSNFILDPQRRTTVMTAFG
QGSTAILEKQIVDRAISDLQPVQQFQVEPASAAKYRLKNSRVRFPNVTADDPLYRRKDGGFVPGMDALRRKNVLEQRFFGKSFA
DNIHIQMIYSILDIHKILAAASGHIVHLLNIVNGSKDRDFIGMLAAHVLYNELNEEAKRSIADFCKSPRLIYYSAAFYETLDNG
KSERRSNEDIFNILALMTCLRNFSSHHSIAIKVKDYSAAGLYNLRRLGPDMKKMLDTFYTEAFIQLNQSFQDHNTTNLTCLFDI
LNISDSARQKQLAEEFYRYVVFKEQKNLGFSVRKLREEMLLLPDAAVIADKRYDTCRSKLYNLMDFLILRVYRTGRADRCDKLP
EALRAALTDEEKAVVYHKEALSLWNEMRTLILDGLLPQMTPENLSRLSGQKRKGELSLDDAMLKECLYEPGPVPEDAAPEEANA
EYFCRMIYLATLFMDGKEINTLLTTLISKFENIAAFLQTMEQLNIEAELGPEYAMFTRSRAVAEQLRVINSFALMKKPQVNAKQ
QLYRAAVTLLGTEDPDGVTDEMLCIDPVTGKMLPPNQRHHGDTGLRNFIANNVVESRRFQYLIRYSDPAQLHQLASNKKLVRFV
LSSIPDTQINRYYETCGQTRLAGRAAKVEFLTDMIAAIRFDQFRDVNQKERGANTQKERYKAMLGLYQTVLYLAVKNLVNINAR
YVMAFHCVERDMFLYDGELTDPKGESVSAFLAVNGKKGVQPQYLLLTQLFIRRDYLKRSACEQIQHNMENISDRLLREYRNAVA
HLNVIAHLADYSADMREITSYYGLYHYLMQRHLFKRHAWQIRQPERPTEEEQKLIEQEQKQLAWEKALFDKTLQYHSYNKDLVK
ALNAPFGYNLARYKNLSIEPLFSKEAAPAAEIKATHA (SEQ ID NO: 295)
>OIZX01000427_26
[human gut metagenome]
MLLSEELYKWGKAGSTMAKKKKTARQLREEMQQQRKQAIQKQQEQRQEKAAAARETAAPEQPAAAPVPKRQRKSLAKAAGLKSN
FILDPQRRTTVMTAFGQGSTAILEKQIVDRAISDLQPVQQFQVEPASAAKYRLKNSRVRFPNVTADDPLYRRKDGGFVPGMDAL
RRKNVLEQRFFGKSFADNIHIQMIYSILDIHKILAAASGHIVHLLNIVNGSKDRDFIGMLAAHVLYNELNEEAKRSIADFCKSP
RLIYYSAAFYETLDNGKSERRSNEDIFNILALMTCLRNFSSHHSIAIKVKDYSAAGLYNLRRLGPDMKKMLDTFYTEAFIQLNQ
SFQDHNTTNLTCLFDILNISDSARQKQLAEEFYRYVVFKEQKNLGFSVRKLREEMLLLPDAAVIADKRYDTCRSKLYNLMDFLI
LRVYRTGRADRCDKLPEALRAALTDEEKAVVYHKEALSLWNEMRTLILDGLLPQMTPENLSRLSGQKRKGELSLDDAMLKECLY
EPGPVPEDAAPEEANAEYFCRMIYLATLFMDGKEINTLLTTLISKFENIAAFLQTMEQLNIEAELGPEYAMFTRSRAVAEQLRV
INSFALMKKPQVNAKQQLYRAAVTLLGTEDPDGVTDEMLCIDPVTGKMLPPNQRHHGDTGLRNFIANNVVESRRFQYLIRYSDP
AQLHQLASNKKLVRFVLSSIPDTQINRYYETCGQTRLAGRAAKVEFLTDMIAAIRFDQFRDVNQKERGANTQKERYKAMLGLYQ
TVLYLAVKNLVNINARYVMAFHCVERDMFLYDGELTDPKGESVSAFLAVNGKKGVQPQYLLLTQLFIRRDYLKRSACEQIQHNM
ENISDRLLREYRNAVAHLNVIAHLADYSADMREITSYYGLYHYLMQRHLFKRHAWQIRQPERPTEEEQKLIEQEQKQLAWEKAL
FDKTLQYHSYNKDLVKALNAPFGYNLARYKNLSIEPLFSKEAAPAAEIKATHA (SEQ ID NO: 296)
>OJMJ01002228_5
[human gut metagenome]
MAKKNKMKPRELREAQKKARQLKAAEINNNAVPAIAAMPAAQVIAPAAEKKKSSVKAAGMKSILVSKNKMYITSFGKGNSAVLE
YEVDNNDYNKTQLSSKDNSNIELRGVTKVNITFSSKHGLESGVEINTSNPTHRSGESSPVRWDMLGLKSELEKRFFGKTFDDNI
HIQLIYNILDIEKILAVYVTNIVYALNNMLGVKGSESHDDFIGYLSTNNTYDVFIDPDNSSLSDDKKANVRKSLSKFNALLKTK
RLGYFGLEEPKTKDNRVSEAYKKRVYHMLAIVGQIRQCVFHDKSGAKRFDLYSFINNIDPEYRETLDYLVDERFDSINKDFIQG
NKVNISLLIDMMKGYEADDIIRLYYDFIVLKSQKNLGFSIKKLREKMLDEYGFRFKDKQYDSVRSKMYKLMDFLLFCNYYRNDV
VAGEALVRKLRFSMTDDEKEGIYADEAAKLWGKFRNDFENIADHMNGDVIKELGKADMDFDEKILDSEKKNASDILYFSKMIYM
LTYFLDGKEINDLLTTLISKFDNIKEFLKIMKSSAVDVECELTAGYKLFNDSQRITNELFIVKNIASMRKPAASAKLTMFRDAL
TILGIDDNITDDRISEILKLKEKGKGIHGLRNFITNNVIESSRFVYLIKYANAQKIREVAKNEKVVMFVLGGIPDTQIERYYKS
CVEFPDMNSSLEVKRSELARMIKNISFDDFKNVKQQAKGRENVAKERAKAVIGLYLTVMYLLVKNLVNVNARYVIAIHCLERDF
GLYKEIIPELASKNLKNDYRILSQTLCDDRDESPNLFLKKNKRLRKCVEVDINNADSSMTRKYRNCIAHLTVVRELKEYIGDIR
TVDTYFSIYHYVMQRCITKREDDTKQEEKIKYEDDLLKNHGYTKDFVKALNSPFGYNIPRFKNLSIEQLFDRNEYLTEK (SEQ
ID NO: 297)
>OJMM01002900_7
[human gut metagenome]
MMGKHLNAKQRKLEKKLKNQQKDMMYTKSTDAVSVPTLKAAPTKAEMSQDTAEASTLITPGTLKTKAKAMGLKSTLVFDDKIVV
TSFLNSKTEENEKCAHIEKIADCNGQTIVERPRMFNTSINAKKVDLSKDNDETNYPNPAFEDCGRDYINVKSALEKRVFGKTYN
KDNLHVQIAYNIFDIKKIIGAYINNIIYIFYNLGREEYDAKKDIIGTQDSAYISKILNNTSAYFTYFDGVFKQITDRDSNKDRE
IKNSYNALVLKVLYYLRQFCMHGNTYTKRNEESFLSDTALYNAKEFFAKADPQINELIDAVYADGIKTINSDFMAHAKNNMYII
CEVYKNEAEDSLMKEYYDFVVRKEGNNLGFNTRQLREILIDKYVGNLRGKKYNTFRNKLYTVLGFILVKEIKRNPKIQDSFIAK
LRANQNGDEGKLNIYNEFAPKIWSVVSSKLNSAITCFDEESLSKFKGYKDIDESLISRYGITVANTDTLVKILYFLCKFLDGKE
INELCCAMINKFDNINDLIKTAAQCGEDIEFVKEYKLFINSNDLSDQIRIVKSISKMKPELSKIGEALILDAIDILGYKINKYK
YDAAGNRLVDSNNKPVYSEEYCAFKKDFFETCELDEFGRVKYNKKGKPVINHRRRNFIINNVLSSKWFFYVAKYNRPSECQKFM
KSKKLIALVLKDVPETQIARYYQSVTGGRTQANSEAMRMTLIKLLHEFSIKNVLSDVGTMTASENKRQIENSRKERMKAIVKLY
LTVVYLIAKSLVKVNTRFSIAFSAYERDVSLLADENELIALANNEDDKWKKGNYVFALTKHFWDNDEPYFDKYNNALQQIRSIV
DPNERRLAYRANDKVVKHTHFNLHSYKYVKHNYEEISKASKIITAYRNNVQHLNVMNSITKYLGDISEVTSYYSLYCYTLQRLL
LDDNNNDKFASIKGNLRKFGIYNKDFMWLLNIPFAYNLPRYKNLSNEEIFYDELQK (SEQ ID NO: 298)
>OJMM01002900_7
[human gut metagenome]
MGKHLNAKQRKLEKKLKNQQKDMMYTKSTDAVSVPTLKAAPTKAEMSQDTAEASTLITPGTLKTKAKAMGLKSTLVFDDKIVVT
SFLNSKTEENEKCAHIEKIADCNGQTIVERPRMFNTSINAKKVDLSKDNDETNYPNPAFEDCGRDYINVKSALEKRVFGKTYNK
DNLHVQIAYNIFDIKKIIGAYINNIIYIFYNLGREEYDAKKDIIGTQDSAYISKILNNTSAYFTYFDGVFKQITDRDSNKDREI
KNSYNALVLKVLYYLRQFCMHGNTYTKRNEESFLSDTALYNAKEFFAKADPQINELIDAVYADGIKTINSDFMAHAKNNMYIIC
EVYKNEAEDSLMKEYYDFVVRKEGNNLGFNTRQLREILIDKYVGNLRGKKYNTFRNKLYTVLGFILVKEIKRNPKIQDSFIAKL
RANQNGDEGKLNIYNEFAPKIWSVVSSKLNSAITCFDEESLSKFKGYKDIDESLISRYGITVANTDTLVKILYFLCKFLDGKEI
NELCCAMINKFDNINDLIKTAAQCGEDIEFVKEYKLFINSNDLSDQIRIVKSISKMKPELSKIGEALILDAIDILGYKINKYKY
DAAGNRLVDSNNKPVYSEEYCAFKKDFFETCELDEFGRVKYNKKGKPVINHRRRNFIINNVLSSKWFFYVAKYNRPSECQKFMK
SKKLIALVLKDVPETQIARYYQSVTGGRTQANSEAMRMTLIKLLHEFSIKNVLSDVGTMTASENKRQIENSRKERMKAIVKLYL
TVVYLIAKSLVKVNTRFSIAFSAYERDVSLLADENELIALANNEDDKWKKGNYVFALTKHFWDNDEPYFDKYNNALQQIRSIVD
PNERRLAYRANDKVVKHTHFNLHSYKYVKHNYEEISKASKIITAYRNNVQHLNVMNSITKYLGDISEVTSYYSLYCYTLQRLLL
DDNNNDKFASIKGNLRKFGIYNKDFMWLLNIPFAYNLPRYKNLSNEEIFYDELQK (SEQ ID NO: 299)
>OJMN01000417_22
[human gut metagenome]
MAKKNKMKPRELREAQKKARQLKVAEINNNAAPAIAAMPAVEVIAPAAEKKKSSVKAAGMKSILVSENKMYITSFGKGNSAVLE
YEVDNNDYNKTQLSSKDNSNIELGNVNEVNITFSSRRGFESGVEINTSNPTHRSGESSSVRGDMLGLKSELEKRFFGKTFDDNI
HIQLIYNILDIEKILAVYVTNIVYALNNMLGIKGSESYDDFMGYLSARNTYEVFTNPNGSTLSDDKKENIRKSLSKFNALLKTK
RLGYFGLEEPKTKDTRVSQAYKKRVYHMLAIVGQIRQSVFHDKSSKLDEDLYSFIDIIDSEYRETLDYLVDERFDSINKGFIQG
NKVNISLLIDMMKDDYEADDIIRLYYDFIVLKSQKNLGFSIKKLREKMLDEYGFRFKDKQYDSVRSKMYKLMDFLLFCNYYRND
VVAGEALVRKLRFSMTDDEKEGTYADEAEKLWGKFRNDFENIADHMNGDAIKELGKADMDFDEKILDSEKKNASDLLYFSKMIY
MLTYFLDGKEINDLLTTLISKFDNIKEFLKIMKSSAVDVECELTAGYKLFNDSQRITNELFIVKNIASMRKPAASAKLTMFRDA
LTILGIDDNITDDRISEILKLKEKGKGIHGLRNFITNNVIESSRFVYLIKYANAQKIREVAKNEKVVMFVLGGIPDTQIERYYK
SCVEFPDMNSSLEAKRSELARMIKNISFDDFKNVKQQAKGRENVAKERAKAVIGLYLTVMYLLVKNLVNVNARYVIAIHCLERD
FGLYKEIIPELASKNLKNDYRILSQTLCELCDKSPNLFLKKNERLRKCVEVDINNADSSMTRKYRNCIAHLTVVRELKEYIGDI
RTVDSYFSIYHYVMQRCITKRENDTKQEDKIKYEDDLLKNHGYTKDFVKALNSPFGYNIPRFKNLSIEQLFDRNEYLTEK
(SEQ ID NO: 300)
>OJNR01001167_9
[human gut metagenome]
MGKKIHARDLREQRKTDRTVKFADQNKKREAQRAVQKKDAAVSVKSVSSVSSKKDNATKSMAKAAGVKSVFAVENTVYMTSFGR
GNDAVLEQKIVDTSHEQLNIDDPAYQLNVVTMNGYSVTGHRGETVSAVTDNPLRRFNGGKKDEPEQSVPTDMLCLKPTLEKKFF
GKEFNDNIHIQLIYNILDIEKILAVYSTNAIYALNNMSADENIENSDFFMKRTTDETFDDFEKKKESTNSREKADFDAFEKFIG
NYRLAYFADAFYVNKKNPKGKARNVLREDKELYSVLTLIGKLRHWCVHSEEGRAEFWLYKLDELKDDFKNVLDVVYNRPVEEIN
NRFIENNKVNIQILGSVYKNTDIAELVRSYYEFLITKKYKNMGFSIKKLRESMLEGKGYADKEYDSVRNKLYQMTDFILYTGYI
NEDSDRADDLVNTLRSSLKEDDKTTVYCKEADYLWKKYRESIREVADALDVDNIKNLSGSNIEIRDNELRKCFISYADSVSEFT
KLIYLLTRFLSGKEINDLVTTLINKFDNIRSFLEIMDELGLDRTFTAEYSFFEGSTKYLAELVELNSFVKSCSFDINAKRTMYR
DALDILGIESDKTEEDIEKMIDNILQIDANGDKKLKKNNGLRNFIASNVIDSNRFKYLVRYGNPKKIRETAKCEPAVRFVLNEI
PDAQIERYYEACCPKNTALCSANKRREKLADMIAEIEFENFSDAGNYQKANVTSRTSEAEIKRKNQAIIRLYLTVMYIMLKNLV
NVNARYVIAFHCVERDTKLYAESGLEVGNIEKNKTNLTMAVMGVKLENGIIKTEFDKSLAENAANRYLRNARWYKLILDNLKKS
ERAVVNEFRNTVCHLNAIRNININIDGIKEVENYFALYHYLIQKHLENRFADKKVERDTGDFISKLEEHKTYCKDFVKAYCTPF
GYNLVRYKNLTIDGLFDKNSPGKDDSDEQK (SEQ ID NO: 301)
>OJPG01000139_73
[human gut metagenome]
MAKKNKMKPRELREAQKKARQLKAAEINNNAVPAIAAMPAAEAAAPAAEKKKSSVKAAGMKSILVSENKMYITSFGKGNSAVLE
YEVDNNDYNKTQLSSKDNSNIELGDVNEVNITFSSKRGNESGVEINTSNPTHRSGESSPVRWDMLGLKSELEKRFFGKTFDDNI
HIQLIYNILDIEKILAVYVTNIVYALNNMLGEGDESNYDFMGYLSTFNTYKVFTNPNGSTLSDDKKENIRKSLSKFNALLKTKR
LGYFGLEEPKTKDTRASEAYKKRVYHMLAIVGQIRQCVFHDKSGAKRFDLYSFINNIDPEYRETLDYLVDERFDSINKGFIQGN
KVNISLLIDMMKGYEADDIIRLYYDFIVLKSQKNLGFSIKKLREKMLDEYGFRFKDKQYDSVRSKMYKLMDFLLFCNYYRNDIA
AGESLVRKLRFSMTDDEKEGIYADEAAKLWGKFRNDFENIADHMNGDVIKELGKADMDFDEKILDSEKKNASDLLYFSKMIYML
TYFLDGKEINDLLTTLISKFDNIKEFLKIMKSSAVDVECELTAGYKLFNDSQRITNELFIVKNIASMRKPAASAKLTMFRDALT
ILGIDDKITDDRISEILKLKEKGKGIHGLRNFITNNVIESSRFVYLIKYANAQKIREVAKNEKVVMFVLGGIPDTQIERYYKSC
VEFPDMNSSLGVKRSELARMIKNISFDDFKNVKQQAKGRENVAKERAKAVIGLYLTVMYLLVKNLVNVNARYVIAIHCLERDFG
LYKEIIPELASKNLKNDYRILSQTLCELCDKSPNLFLKKNERLRKCVEVDINNADSSMTRKYRNCIAHLTVVRELKEYIGDIRT
VDSYFSIYHYVMQRCITKREDDIKQEEKIKYEDDLLKNHGYTKDFVKALNSPFGYNIPRFKNLSIEQLFDRNEYLTEK (SEQ
ID NO: 302)
>OJPX01000614_4
[human gut metagenome]
MAKKNKMKPRELREAQKKARQLKVAEINNNAAPAIAAMPAVEVIAPAAEKKKSSVKAAGMKSILVSENKMYITSFGKGNSAVLE
YEVDNNDYNKTQLSSKDNSNIELGNVNEVNITFSSRRGFESGVEINTSNPTHRSGESSSVRGDMLGLKSELEKRFFGKTFDDNI
HIQLIYNILDIEKILAVYVTNIVYALNNMLGIKGSESYDDFMGYLSARNTYEVFTNPNGSTLSDDKKENIRKSLSKFNALLKTK
RLGYFGLEEPKTKDTRVSQAYKKRVYHMLAIVGQIRQSVFHDKSSKLDEDLYSFIDIIDSEYRETLDYLVDERFDSINKGFVQG
NKVNISLLIDMMKDDYEADDIIRLYYDFIVLKSQKNLGFSIKKLREKMLDEYGFRFKDKQYDSVRSKMYKLMDFLLFCNYYRND
VVAGEALVRKLRFSMTDDEKEGIYADEAAKLWGKFRNDFENIADHMNGDVIKELGKADMDFDEKILDSEKKNASDLLYFSKMIY
MLTYFLDGKEINDLLTTLISKFDNIKEFLKIMKSSAVDVECELTAGYKLFNDSQRITNELFIVKNIASMRKPAASAKLTMFRDA
LTILGIDDNITDDRISEILKLKEKGKGIHGLRNFITNNVIESSRFVYLIKYANAQKIREVAKNEKVVMFVLGGIPDTQIERYYK
SCVEFPDMNSSLEVKRSELARMIKNICFDDFKNVKQQAKGRENVAKERAKAVIGLYLTVMYLLVKNLVNVNARYVIAIHCLERD
FGLYKEIVSELASKNLKNDYRILSQTLCELCDKSPNLFLKKNERLRKCVEVDINNADSSMTRKYRNCIAHLTVVRELKEYIGDI
RAVDSYFSIYHYVMQRCITKRGNDTKQEDKIKYEDDLLKNHGYTKDFVKALNSPFGYNIPRFKNLSIEQLFDRNEYLTEK
(SEQ ID NO: 303)
>OKRZ01002949_5
[human gut metagenome]
MAKKNKMKPRELREAQKKARQLKAAEINNNAAPAIAAMPAAEVIAPAAEKKKSSVKAAGMKSIFVSENKMYITSFGKGNSAVLE
YEVDKVDNNVYNQTQLSSEDSSNIELCGVTKVNITFSSKHGLESGVEISTSNPTHRSGESSPVRWDMLGLKSELEKRFFGKTFD
DNIHIQFIYNILDIEKILAVYVTNSVYALNNMLGVKGSESHDDFIGYLSTNNIYDVFIDPDNSSLSDDKKANVRKSLSKFNALL
KTKRLGYFGLEEPKTKDTRVSEAYKKRVYHMLAIVGQIRQCVFHDKSSKLDEDLYSFIDIIDPEYRETLDYLVDERFDSINKGF
IQGNKVNISLLIDMMKGYEADDIIRLYYDFIVLKSQKNLGFSIKKLREKMLDEYGFRFKDKQYDPVRSKMYKLMDFLLFCNYYR
NDVVAGEALVRKLRFSMTDDEKEGIYADEAEKLWGKFRNDFENIADHMNGDVIKELGKADMDFDEKILDSEKKNASDLLYFSKM
IYMLTYFLDGKEINDLLTTLISKFDNIKEFLKIMKSSAVNVECELTAGYKLFNDSQRITNELFIVKNIASMRKPAASAKLTMFR
DALTILGIDDKITDDRISEILKLKEKGKGIHGLRNFITNNVIESSRFVYLIKYANAQKIRKVAENEKVVMFVLGGIPDTQIERY
YKSCVEFPDMNSSLEAKRSELARMIKNISFDDFKNVKQQAKGRENVAKERAKAVIGLYLTVMYLLVKNLVNVNARYVIAIHCLE
RDFGLYKEIIPELASKNLKNDYRILSQTLCELCDKSPNLFLKKNERLRKCVEVDINNADSSMTRKYRNCIAHLTVVRELKEYIG
DIRTVDSYFSIYHYVMQRCITKRENDTKQEDKIKYEDDLLKNHGYTKDFVKALNSPFGYNIPRFKNLSIEQLFDRNEYLTEK
(SEQ ID NO: 304)
>OKSB01002689_10
[human gut metagenome]
MAKKNKMKPRELREAQKKARQLKAAEINNNAAPAIAAMPAAEVIAPAAEKKKSSVKAAGMKSILVSENKMYITSFGKGNSAVLE
YEVDNNDYNKTQLSSKDNSNIELGNVNEVNITFSSRRGFESGVEINTSNPTHRSGESSSVRGDMLGLKSELEKRFFGKTFDDNI
HIQLIYNILDIEKILAVYVTNIVYALNNMLGVKGSESYDDFMGYLSAQNTYYIFTHPDKSNLSDKVKGNIKKSLSKFNDLLKTK
RLGYFGLEEPKTKDTRVSQAYKKRVYHMLAIVGQIRQCVFHDKSGAKRFDIYSFINNIDPEYRETLDYLVDERFDSINKGFIQG
NKVNISLLIDMMKDYEADDIIRLYYDFIVLKSQKNLGFSIKKLREKMLDEYGFRFKDKQYDSVRSKMYKLMDFLLFCNYYRNDV
VAGETLVRKLRFSMTDDEKEGIYADEAAKLWGKFRNDFENIADHMNGDVIKELGKADMDFDEKILDSEKKNASDLLYFSKMIYM
LTYFLDGKEINDLLTTLISKFDNIKEFLKIMKSSAVDVECELTEGYKLFNDSQRITNELFIVKNIASMRKPAASAKLTMFRDAL
TILGIDDKITDDRISEILKLKEKGKGIHGLRNFITNNVIESSRFVYLIKYANAQKIREVAKNEKVVMFVLGGIPDTQIERYYKS
CVEFPDMNSSLEAKRSELARMIKNIRFDDFKNVKQQAKGRENVAKERAKAVIGLYLTVMYLLVKNLVNVNARYVIAIHCLERDF
GLYKEIIPELASKNLKNDYRILSQTLCELCDDRDESPNLFLKKNKRLRKCVEVDINNADSSMTRKYRNCIAHLTVVRELKEYIG
DIRTVDSYFSIYHYVMQRCITKREDDTKQEEKIKYEDVLLKNHGYTKDFVKALNSPFGYNIPRFKNLSIEQLFDRNEYLTEK
(SEQ ID NO: 305)
>OKSC01004083_2
[human gut metagenome]
MEREVKKPPKKSLAKAAGLKSTFVISPQEKELAMTAFGRGNDALLQKRIVDGVVRDVAGEKQQFQVQRQDESRFRLQNSRLADR
TVTADDPLHRAETPRRQPLGAGMDQLRRKAILEQKYFGRTFDDNIHIQLIYNILDIHKMLAVPANHIVHTLNLLGGYGETDFVG
MLPAGLPYDKLRVVKKKNGDTVDIKADIAAYAKRPQLAYLGAAFYDVTPGKSKRDAARGRVKREQDVYTILSLMSLLRQFCAHD
SVRIWGQNTPAALYHLQALPQDMKDLLDDGWRRALGGVNDHFLDTNKVNLLTLFEYYGAETKQARVALTQDFYRFVVLKEQKNM
GFSLRRLREELLKLPDAAYLTGQEYDSVRQKLYMLLDFLLCRLYAQERTGRCEELVSALRCALSDEEKDAVYQAEAAALWQALG
DTLRRELLPLLKGKKLQDKDKKKLDELGLSRDVLDGVLFRPAQQGNRANADYFCRLMHLSTWFMDGKEINTLLTTLISKLENID
SLRNVLESMGLACSFVPAYAMFDHSRYIAGQLRVVNNIARMRKPAITAKREMYRAAVVLLGVDSPEAAAAITDDLLQIDPETGK
VRPRGDSARDTGLRNFIANNVVESRRFTYLLRYMTPEQARVLAQNEKLIAFVLSTVPDTQLERYCRTCGREDITGRPAQIRYLT
AQIMGVRYESFTDVEQRGRGDNPKKERYKALIDLYLTVLYLAVKNMVNCNARYVIAFYCRDRDTALYQKEVCWYDLEEDKKSGK
QRQVEDYTALTRYFVSQGYLNRHACGYLRSNMNGISNSLLTAYRNAVDHLNVIPPLGSLCRDIGRVDSYFALYHYAVQRYLNGR
YYRKTPREQELFAAMAQHRTWCSDLVKALNTPFGYNLARYKNLSIDGLFDREGDHVVREDGEKPAE (SEQ ID NO: 306)
>OKSD01002505_11
[human gut metagenome]
MAKKNKMKPRELREAQKKARQLKAAEINNNAAPAIAAMPAEEVIAPAAEKKKSSVKAAGMKSILVSKNKMYITSFGKGNSAVLE
YEVDKVDNDNYNKTQLSSEDSSNIELCGVTKVNITFSSKHGLESGVEISTSNPTHRSGESSPVRWDMLGLKSELEKRFFGKTFD
DNIHIQFIYNILDIEKILAVYVTNIVYALNNMLGVKGSESYDDFMGYLSARNTYEVFTHPDKSNLSDKVKGNIKKSFSTFNDLL
KTKRLGYFGLEEPKTKDNRVSEAYKKRVYHMLAIVGQIRQSVFHDKSSKLHEDLYSFIDIIDPEYRETLDYLVDERFDSINKGF
IQGNKVNISLLIDMMKGYEADDIIRLYYDFIVLKSQKNLGFSIKKLREKMLDEYGFRFKDKQYDSVRSKMYKLMDFLLFCNYYR
NDVVAGEALVRKLRFSMTDDEKEGIYADEAAKLWGKFRNDFENIADHMNGDVIKELGKADMDFDEKILDSEKKNASDLLYFSKM
IYMLTYFLDGKEINDLLTTLISKFDNIKEFLKIMKSSAVDVECELTAGYKLFNDSQRITNELFIVKNIASMRKPAASAKLTMFR
DALTILGIDDKITDDRISEILKLKEKGKGIHGLRNFITNNVIESSRFVYLIKYANAQKIREVAKNEKVVMFVLGGIPDTQIERY
YKSCVEFPDMNSSLEAKRSELARMIKNISFDDFKNVKQQAKGRENVAKERAKAVIGLYLTVMYLLVKNLVNVNARYVIAIHCLE
RDFGLYKEIIPELASKNLKNDYRILSQTLCELCDKSPNLFLKKNERLRKCVEVDINNADSSMTRKYRNCIAHLTVVRELKEYIG
DIRTVDSYFSIYHYVMQRCITKRENDTKQEDKIKYEDDLLKNHGYTKDFVKALNSPFGYNIPRFKNLSIEQLFDRNEYLTEK
(SEQ ID NO: 307)
>OLGN01000304_32
[human gut metagenome]
MAKKNKMKPRELREAQKKARQLKAAEINNNAVPAIAAMPAAQVIAPAAEKKKSSVKAAGMKSILVSENKMYITSFGKGNSAVLE
YEVDNNDYNKTQLSSKDSSNIELRGVNEVNITFSSKHGFGSGVEINTSNPTHRSGESSPVRWDMLGLKSELEKRFFGKTFDDNI
HIQLIYNILDIEKILAVYVTNIVYALNNMLGIKKSESHDDFMGYLSAKNTYDVFTNPNGSTLSDDKKKNIRKSLRKFNDLLKTK
RLGYFGLEEPKTKDTRVSQAYKKRVYHMLAIVGQIRQSVFHDKSSKLHEDLYSFIDIIDSEYRETLDYLVDERFDSINKGFIQG
NKVNISLLIDMMKDDYEADDIIRLYYDFIVLKSQKNLGFSIKKLREKMLDEYGFRFKDKQYDSVRSKMYKLMDFLLFCNYYRND
VIAGEALVRKLRFSMTDDEKEGIYADEAAKLWGKFRNDFENIADHMNGDVIKELGKADMDFDEKILDSEKKNASDLLYFSKMIY
MLTYFLDGKEINDLLTTLISKFDNIKEFLKIMKSSAVDVECELTAGYKLFNDSQRITNELFIVKNIASMRKPAASAKLTMFRDA
LTILGIDDNITDDRISEILKLKEKGKGIHGLRNFITNNVIESSRFVYLIKYANAQKIREVAKNEKVVMFVLGGIPDTQIERYYK
SCVEFPDMNSSLEAKRSELARMIKNISFDDFKNVKQQAKGRENVAKERAKAVIGLYLTVMYLLVKNLVNVNARYVIAIHCLERD
FGLYKEIIPELASKNLKNDYRILSQTLCELCDKSPNLFLKKNRRLRKCVEVDINNADSSMTRKYRNCIAHLTVVRELKEYIGDI
RTVDSYFSIYHYVMQRCITKRENDTKQEEKIKYEDDLLKNHGYTKDFVKALNSPFGYNIPRFKNLSIEQLFDRNEYLTEK
(SEQ ID NO: 308)
>OLHE01000257_41
[human gut metagenome]
MAKKNKMKPRELREAQKKARQLKVAEINNNAAPAIAAMPAAEAAAPAVEKKKSSVKAAGMKSILVSENKMYITSFGKGNSAVLE
YEVDNNDYNKTQLSSKDNSNIELGDVDEVNITFSSKHGFGSGVEINTSNPTHRSGESSPVRWDMLGLKSELEKRFFGKTFDDNI
HIQLIYNILDIEKILAVYVTNIVYALNNMLGIKGSESYDDFMGYLSAKNTYDVFTDPDESDLSKNIKGNIKKSLSKFNDLLKTK
RLGYFGLEEPKTKDKRVSEAYKKRVYHMLAIVGQIRQSVFHDKSSKLDEDLYSFIDIIDSEYRETLDYLVNERFDSINKGFIQG
NKVNISLLIDMMKGDYEADDIIRLYYDFIVLKSQKNLGFSIKKLREKMLDEYGFRFKDKQYDSVRSKMYKLMDFLLFCNYYRND
VVAGEALVRKLRFSMTDDEKEGIYADEAAKLWGKFRNDFENIADHMNSDVIKQLGKADMDFDEKILDSEKKNASDLLYFSKMIY
MLTYFLDGKEINDLLTTLISKFDNIKEFLKIMKSSAVDVECELTAGYKLFNDSQRITNELFIVKNIASMRKPAASAKLTMFRDA
LTILGIDDKITDDRISEILKLKEKGKGIHGLRNFITNNVIESSRFVYLIKYANAQKIREVAKNEKVVMFVLGGIPDTQIERYYK
SCVEFPDMNSSLEAKRSELARMIKNISFDDFKNVKQQAKGRENVAKERAKAVIGLYLTVMYLLVKNLVNVNARYVIAIHCLERD
FGLYKEIIPELASKNLKNDYRILSQTLCELCDNCDESPNLFLKKNKRLRKCVEVDINNADSSMTRKYRNCIAHLTVVRELKEYI
GDIRTVDSYFSIYHYVMQRCITKREDDTKQEEKIKYEDDLLKNHGYTKDFVKALNSPFGYNIPRFKNLSIEQLFDRNEYLTEK
(SEQ ID NO: 309)
>PPYE01106492_34
[human gut metagenome]
MAKKNKMKPRELREAQKKARQFKAAEINNNAAPAIAAMPAAEVIAPVAEKKKSSVKAAGMKSILVSENKMYITSFGKGNSAVLE
YEVDNNDYNKTQLSSKDNSNIELGDVDEVNITFSSKHGFGSGVEINTSNPTHRSGESSPVRWDMLGLKSELEKRFFGKTFDDNI
HIQLIYNILDIEKILAVYVTNIVYALNNMLGEGDDESHDDFMGYLSTFNTYKVFTNPNGSTLSDDKKENIRKSLSKFNALLKTK
RLGYFGLEEPKTKDTRASEAYKKRVYHMLAIVGQIRQCVFHDKSGAKRFDLYSFINNIDPEYRDTLDYLVDERFDSINKGFIQG
NKVNISLLIDMMKGYEADDIIRLYYDFIVLKSQKNLGFSIKKLREKMLEEYGYRFKDKQYDSVRSKMYKLMDFLLFCNYYRNDV
VAGESLVRKLRFSMTDDEKEGIYADEAEKLWGKFRNDFENIADHMNGDVIKELGKADMDFDEKILDSEKKNASDLLYFSKMIYM
LTYFLDGKEINDLLTTLISKFDNIKEFLKIMKSSAVDVECELTAGYKLFNDSQRITNELFVVKNIASMRKPAVSAKLTMFRDAL
TILGIDDKITDDRISEILKLKEKGKGIHGLRNFITNNVIESSRFVYLIKYANAQKIREVAKNEKVVMFVLGGIPDTQIERYYKS
CVEFPDMNSSLEAKRSELARMIKNISFDDFKNVKQQAKGRENVAKERAKAVIGLYLTVMYLLVKNLVNVNARYVIAIHCLERDF
GLYKEIIPELASKNLKNDYRILSQTLCELCDDRDESPNLFLKKNERLRKCVEVDINNADSSMTRKYRNCIAHLTVVRELKEYIG
DIRTVDSYFSIYHYVMQRCITKRENDTKQEEKIKYEDDLLKNHGYTKDFVKALNSPFGYNIPRFKNLSIEQLFDRNEYLTEK
(SEQ ID NO: 310)
>PPYE01385196_3
[human gut metagenome]
MAKKNKMKPRELREAQKKARQLKVAEINNNAAPAIAAMPAAEVIAPAAEKKKSSVKAAGMKSILVSENKMYITSFGKGNSAVLE
YEVDKVDNNNYNKTQLSSKNSSNIELCGVTKVNITFSSKHGFGSGVKINTSNPTHRSGESSPVRWDMLGLKSELEKRFFGKTFN
DNIHIQLIYNILDIEKILAVYVTNIVYALNNMLGIKDSESYDDFMGYLSARNTYKVFTRPDKSNLSDKAKGNIKKSFSTFNDLL
KTKRLGYFGLEEPKTKDTRVSQAYKKRVYHMLAIVGQIRQSVFHDKSSKLDEDLYSFIDIIDPEYRETLDYLVDERFDSINKGF
IQGNKVNISLLIDMMKGYEADDIIRLYYDFIVLKSQKNLGFSIKKLREKMLDEYGFRFKDKQYDSVRSKMYKLMDFLLFCNYYR
NDVAAGEALVRKLRFSMTDDEKEGIYADEAEKLWVKFRNDFENIADHMNGDVIKELGKADMDFDEKILDSEKKNASDLLYLSKM
IYMLTYFLDGKEINDILTTLISKFDNIKEFLKIMKSSAVNVECELTAGYKLFNDSQRITNELFIVKNIASMRKPAASAKLTMFR
DALTILGIDDKITDDRISEILKLKEKGKGIHGLRNFITNNVIESSRFVYLIKYANAQKIREVAKNEKVVMFVLGGIPDTQIERY
YKSCVEFPDMNSSLEAKRSELARMIKNISFDDFKNVKQQAKGRENVAKERAKAVIGLYLTVMYLLVKNLVNVNARYVIAIHCLE
RDFGLYKEIIPELASKNLKNDYRILSQTLCELCDDRDESPNLFLKKNKRLRKCVEVDINNADSSMTRKYRNCIAHLTVVRELKE
YIGDIRTVDSYFSIYHYVMQRCITKRENDTKQEDKIKYEDDLLKNHGYTKDFVKALNSPFGYNFPRFKNLSIEQLFDRNEYLTE
K (SEQ ID NO: 311)
>PPYE01512733_3
[human gut metagenome]
MAKKNKMKPRELREAQKKARQLKAAEINNNAAPAIAAMSAAEVIAPAAEKKKSSVKAAGMKSILVSENKMYITSFGKGNSAVLE
YEVDNNDYNKTQLSSKDNSNIELGDVNEVNITFSSKHGFGSGVEINTSNPTHRSGESSPVRWDMLGLKSELEKRFFGKTFDDNI
HIQLIYNILDIEKILAVYVTNIVYALNNMLGVKGSESYDDFMGYLSAKNTYEVFTHPDKSNLSDKVKGNIKKSFSTFNDLLKTK
RLGYFGLEEPKTKDTRVSQAYKKRVYHMLAIVGQIRQSVFHDKSSKLHEDLYSFIDIIDSEYRETLDYLVEERLKSINKDFIEG
NKVNISLLIDMMKGYEADDIIRLYYDFIVLKSQKNLGFSIKKLREKMLDEYGFRFKDKQYDSVRSKMYKLMDFLLFCNYYRNDV
VAGETLVRKLRFSMTDDEKEGIYADEAAKLWGKFRNDFENIADHMNGDVIKELGKADMDFDEKILDSEKKNASDLLYFSKMIYM
LTYFLDGKEINDLLTTLISKFDNIKEFLKIMKSSAVDVECELTAGYKLFNDSQRITNELFIVKNIASMRKPAASAKLTMFRDAL
TILGIDDNITDDRISEILKLKEKGKGIHGLRNFITNNVIESSRFVYLIKYANAQKIRKVAKNEKVVMFVLGGIPDTQIERYYKS
CVEFPDMNSSLEVKRSELARMIKNISFDDFKNVKQQAKGRENVAKERAKAVIGLYLTVMYLLVKNLVNVNARYVIAIHCLERDF
GLYKEIIPELASKNLKNDYRILSQTLCELCDKSPNLFLKKNRRLRKCVEVDINNADSSMTRKYRNCIAHLTVVRELKEYIGDIR
TVDSYFSIYHYVMQRCITKREDDTKQEEKIKYEDDLLKNHGYTKDFVKALNSPFGYNIPRFKNLSIEQLFDRNEYLTEK (SEQ
ID NO: 312)
>PPYF01670242_39
[human gut metagenome]
MAKKNKMKPRELREAQKKARQLKAAEINNNAVPAIAAMPAAEAAAPAAEKKKSSVKAAGMKSILVSENKMYITSFGKGNSAVLE
YEVDNNDYNKTQLSSKDNSNIELCDVNEVNITFSSKHGFESGVEINTSNPTHRSGESSPVRWDMLGLKSELEKRFFGKTFDDNI
HIQLIYNILDIEKILAVYITNIVYALNNMLGVKGSESHDDFIGYLSTNNIYDVFIDPDNSSLSDDKKANVRKSLSKFNALLKTK
RLGYFGLEEPKTKDNRVSEAYKKRVYHMLAIVGQIRQSVFHDKSSKLHEDLYSFIDIIDSEYRETLDYLVDERFDSINKGFIQG
NKVNISLLIDMMKGYEADDIIRLYYDFIVIKSQKNLGFSIKKLREKMLDEYGFRFKDKQYDSVRSKMYKLMDFLLFCNYYRNDV
VAGEALVRKLRFSMTDDEKEGIYADEAEKLWGKFRNDFENIADHMNGDVIKELGKADMDFDEKILDSEKKNASDLLYFSKMIYM
LTYFLDGKEINDLLTTLISKFDNIKEFLKIMKSSAVNVECELTAGYKLFNDSQRITNELFIVKNIASMRKPAASAKLTMFRDAL
TILGIDDKITDDRISEILKLKEKGKGIHGLRNFITNNVIESSRFVYLIKYANAQKIREVAKNEKVVMFVLGGIPDTQIERYYKS
CVEFPDMNSSLEAKRSELARMIKNISFDDFKNVKQQAKGRENVAKERAKAVIGLYLTVMYLLVKNLVNVNARYVIAIHCLERDF
GLYKEIIPELASKNLKNDYRILSQTLCELCDKSPNLFLKKNKRLRKCVEVDINNADSSMTRKYRNCIAHLTVVRELKEYIGDIR
TVDSYFSIYHYVMQRCITKRENDTKQEEKIKYEDDLLKNHGYTKDFVKALNSPFGYNIPRFKNLSIEQLFDRNEYLTEK (SEQ
ID NO: 313)
>ODFW01000112_43
[human metagenome]
MAKKNKMKPRELREAQKKARQFKAAEINNNAAPAIAAMPAAEVIAPVAEKKKSSVKAAGMKSILVSENKMYITSFGKGNSAVLE
YEVDNNDYNKTQLSSKDNSNIELCGVNEVNITFSSKHGFESGVEINTSNPTHRSGESSPVRWDMLGLKSELEKRFFGKTFDDNI
HIQLIYNILDIEKILAVYVTNIVYALNNMLGEGDESNYDFMGYLSTFNTYKVFTNPNGSTLSDDKKENIRKSLSKFNALLKTKR
LGYFGLEEPKTKDTRVLEAYKKRVYHMLAIVGQIRQCVFHDLSEHSEYDLYSFIDNSKKVYRECRETLDYLVDERFDSINKGFI
QGNKVNISLLIDMMKGYEADDIIRLYYDFIVLKSQKNLGFSIKKLREKILDEYGFRFKDKQYDSVRSKMYKLMDFLLFCNYYRN
DIAAGESLVRKLRFSMTDDEKEGIYADEAAKLWGKFRNDFENIADHMNGDVIKELGKADMDFDEKILDSEKKNASDLLYFSKMI
YMLTYFLDGKEINDLLTTLISKFDNIKEFLKIMKSSAVDVECELTAGYKLFNDSQRITNELFIVKNIASMRKPAASAKLTMFRD
ALTILGIDDKITDDRISEILKLKEKGKGIHGLRNFITNNVIESSRFVYLIKYANAQKIREVAKNEKVVMFVLGGIPDTQIERYY
KSCVEFPDMNSSLEAKRSELARMIKNIRFDDFKNVKQQAKGRENVAKERAKAVIGLYLTVMYLLVKNLVNVNARYVIAIHCLER
DFGLYKEIIPELASKNLKNDYRILSQTLCELCDNGDESPNLFLKKNKRLRKCVEVDINNADSNMTRKYRNCIAHLTVVRELKEY
IGDIRTVDSYFSIYHYVMQRCITKREDDTKQEEKIKYEDDLLKNHGYTKDFVKALNSPFGYNIPRFKNLSIEQLFDRNEYLTEK
(SEQ ID NO: 314)
>ODGN01000188_50
[human metagenome]
MAKKNKMKPRELREAQKKARQLKAAEINNNAVPAIAAMPAAEVIAPAAEKKKSSVKAAGMKSILVSENKMYITSFGKGNSAVLE
YEVDNNDYNQTQLSSDGSSNIELRGVNEVNITFSSKHGFESGVEINTSNPTHRSGESSPVRGDMLGLKSELEKRFFGKTFDDNI
HIQLIYNILDIEKILAVYVTNIVYALNNMLGVKGSESYDDFMGYLSAQNTYYIFTHPDKSNLSDKVKGNIKKSLSKFNDLLKTK
RLGYFGLEEPKTKDKRVSEAYKKRVYHMLAIVGQIRQSVFHDKSNELDEYLYSFIDIIDSEYRDTLDYLVDERFDSINKGFVQG
NKVNISLLIDMMKGYEADDIIRLYYDFIVLKSQKNLGFSIKKLREKMLDEYGFRFKDKQYDSVRSKMYKLMDFLLFCNYYRNDV
VAGEALVRKLRFSMTDDEKEGIYADEAEKLWGKFRNDFENIADHMNGDVIKELGKADMDFDEKILDSEKKNASDLLYFSKMIYM
LTYFLDGKEINDLLTTLISKFDNIKEFLKIMKSSAVDVECELTAGYKLFNDSQRITNELFIVKNIASMRKPASSAKLTMFRDAL
TILGIDDNITDDRISEILKLKEKGKGIHGLRNFITNNVIESSRFVYLIKYANAQKIRKVAKNEKVVMFVLGGIPDTQIERYYKS
CVEFPDMNSSLEVKRSELARMIKNISFDDFKNVKQQAKGRENVAKERAKAVIGLYLTVMYLLVKNLVNVNARYVIAIHCLERDF
GLYKEIIPELASKNLKNDYRILSQTLCELCDKSPNLFLKKNRRLRKCVEVDINNADSSMTRKYRNCIAHLTVVRELKEYIGDIR
TVDSYFSIYHYVMQRCITKRENDTKQEEKIKYEDDLLKNHGYTKDFVKALNSPFGYNIPRFKNLSIEQLFDRNEYLTEK (SEQ
ID NO: 315)
>ODHH01000275_14
[human metagenome]
MAKKNKMKPRELREAQKKARQLKAAEINNNAAPAIAAMSAAEVIAPAAEKKKSSVKAAGMKSILVSENKMYITSFGKGNSAVLE
YEVDNNDYNKTQLSSKDNSNIELGDVNEVNITFSSKHGFGSGVEINTSNPTHRSGESSPVRWDMLGLKSELEKRFFGKTFDDNI
HIQLIYNILDIEKILAVYVTNIVYALNNMLGVKGSESYDDFMGYLSAKNTYEVFTHPDKSNLSDKVKGNIKKSFSTFNDLLKTK
RLGYFGLEEPKTKDTRVSQAYKKRVYHMLAIVGQIRQSVFHDKSSKLHEDLYSFIDIIDSEYRETLDYLVEERLKSINKDFIEG
NKVNISLLIDMMKGYEADDIIRLYYDFIVLKSQKNLGFSIKKLREKMLDEYGFRFKDKQYDPVRSKMYKLMDFLLFCNYYRNDV
VTGEALVRKLRFSMTDDEKEGIYADEASKLWGKFRNDFENIADHMNGDVIKELGKADMDFDEKILDSEKKNASDLLYFSKMIYM
LTYFLDGKEINDLLTTLISKFDNIKEFLKIMKSSAVDVECELTAGYKLFNDSQRITNELFIVKNIASMRKPASSAKLTMFRDAL
TILGIDDNITDDRISEILKLKEKGKGIHGLRNFITNNVIESSRFVYLIKYANAQKIRKVAKNEKVVMFVLGGIPDTQIERYYKS
CVEFPDMNSSLEVKRSELARMIKNISFDDFKNVKQQAKGRENVAKERAKAVIGLYLTVMYLLVKNLVNVNARYVIAIHCLERDF
GLYKEIIPELASKNLKNDYMILSQTLCELCDKSPNLFLKKNERLRKCVEVDINNADSSMTRKYRNCIAHLTVVRELKEYIGDIR
TVDSYFSIYHYVMQRCITKREDDTKQEEKIKYEDDLLKNHGYTKDFVKALNSSFGYNIPRFKNLSIEQLFDRNEYLTEK (SEQ
ID NO: 316)
>ODHP01001712_3
[human metagenome]
MAKKNKMKPRELREAQKKARQLKAAEINNNAAPAIAAMPAAEVIAPAAEKKKSSVKAAGMKSILVSENKMYITSFGKGNSAVLE
YEVDNNDYNKTQLSSKDNSNIELCDVGKVNITFSSRRGFESGVEINTSNPTHRSGESSSVRGDMLGLKSELEKRFFGKNFDDNI
HIQLIYNILDIEKILAVYVTNIVYALNNMLGEGDESNYDFMGYLSTFNTYKVFTNPNGSTLSDDKKENIRKSLSKFNALLKTKR
LGYFGLEEPKTKDTRASEAYKKRVYHMLAIVGQIRQCVFHDKSGAKRFDLYSFINNIDPEYRETLDYLVDERFDSINKGFIQGN
KVNISLLIDMMKGYEADDIIRLYYDFIVLKSQKNLGFSIKKLREKMLEEYGYRFKDKQYDSVRSKMYKLMDFLLFCNYYRNDVV
AGEALVRKLRFSMTDDEKEGIYADEASKLWGKFRNDFENIADHMNGDVIKELGKADMDFDEKILDSEKKNASDLLYFSKMIYML
TYFLDGKEINDLLTTLISKFDNIKEFLKIMKSSAVDVECELTAGYKLFNDSQRITNELFIVKNIASMRKPASSAKLTMFRDALT
ILGIDDNITDDRISEILKLKEKGKGIHGLRNFITNNVIESSRFVYLIKYANAQKIRKVAKNEKVVMFVLGGIPDTQIERYYKSC
VEFPDMNSSLEVKRSELARMIKNISFDDFKNVKQQAKGRENVAKERAKAVIGLYLTVMYLLVKNLVNVNARYVIAIHCLERDFG
LYKEIIPELASKNLKNDYRILSQTLCELCDKSPNLFLKKNRRLRKCVEVDINNADSSMTRKYRNCIAHLTVVRELKEYIGDIRT
VDSYFSIYHYVMQRCITKREDDTKQEEKIKYEDDLLKNHGYTKDFVKALNSPFGYNIPRFKNLSIEQLFDRNEYLTEK (SEQ
ID NO: 317)
>ODHV01000466_16
[human metagenome]
MAKKNKMKPRELREAQKKARQLKAAEINNNAAPAIAAMPAAQVIAPAAEKKKSSVKAAGMKSILVSENKMYITSFGKGNSAVLE
YEVDKVDNNNYNKTQLSSKDNSNIELGDVNEVNITFSSKHGFESGVEINTSNPTHRSGESSPVRWDMLGLKSELEKRFFGKTFD
DNIHIQLIYNILDIEKILAVYVTNIVYALNNMLGIKGSESYDDFMGYLSARNTYEVFTHPDKSNLSDKVKGNIKKSLSKFNDLL
KTKRLGYFGLEEPKTKDTRVSQAYKKRVYHMLAIVGQIRQSVFHDKSSKLDEDLYSFIDIIDSEYRETLDYLVDERFDSINKGF
IQGNKVNISLLIDMMKGYEADDIIRLYYDFIVLKSQKNLGFSIKKLREKMLDEYGFRFKDKQYDSVRSKMYKLMDFLLFCNYYR
NDVVAGEALVRKLRFSMTDDEKEGIYADEASKLWGKFRNDFENIADHMNGDVIKELGKADMDFDEKILDSEKKNASDLLYFSKM
IYMLTYFLDGKEINDLLTTLISKFDNIKEFLKIMKSSAVDVECELTAGYKLFNDSQRITNELFIVKNIASMRKPAASAKLTMFR
DALTILGIDDKITDDRISEILKLKEKGKGIHGLRNFITNNVIESSRFVYLIKYANAQKIREVAKNEKVVMFVLGGIPDTQIERY
YKSCVEFPDMNSSLEAKCSELARMIKNISFDDFKNVKQQAKGRENVAKERAKAVIGLYLTVMYLLVKNLVNVNARYVIAIHCLE
RDFGLYKEIIPELASKNLKNDYRILSQTLCELCDDRDESPNLFLKKNKRLRKCVEVDINNADSSMTRKYRNCIAHLTVVRELKE
YIGDIRTVDSYFSIYHYVMQRCITKREDDKKQEEKIKYEDDLLKNHGYTKDFVKALNSPFGYNIPRFKNLSIEQLFDRNEYLTE
K (SEQ ID NO: 318)
>ODJZ01000182_13
[human metagenome]
MAKKNKMKPRELREAQKKARQLKAAEINNNAAPAIAAMPAAEVIAPAAEKKKSSVKAAGMKSILVSENKMYITSFGKGNSAVLE
YEVDNNDYNKTQLSSKDNSNIELCDVGKVNITFSSRRGFESGVEINTSNPTHRSGESSSVRGDMLGLKSELEKRFFGKNFDDNI
HIQLIYNILDIEKILAVYVTNIVYALNNMLGEGDESNYDFMGYLSTFNTYKVFTNPNGSTLSDDKKENIRKSLSKFNALLKTKR
LGYFGLEEPKTKDTRASEAYKKRVYHMLAIVGQIRQCVFHDKSGAKRFDLYSFINNIDPEYRETLDYLVDERFDSINKGFIQGN
KVNISLLIDMMKGYEADDIIRLYYDFIVLKSQKNLGFSIKKLREKMLDEYGYRFKDKQYDSVRSKMYKLMDFLLFCNYYRNDVV
AGEALVRKLRFSMTDDEKEGIYADEAAKLWGKFRNDFENIADHMNGDVIKELGKADMDFDEKILDSEKKNASDLLYFSKMIYML
TYFLDGKEINDLLTTLISKFDNIKEFLKIMKSSAVDVECELTAGYKLFNDSQRITNELFIVKNIASMRKPAASAKLTMFRDALT
ILGIDDNITDDRISEILKLKEKGKGIHGLRNFITNNVIESSRFVYLIKYANAQKIREVAKNEKVVMFVLGGIPDTQIERYYKSC
VEFPDMNSSLEAKRSELARMIKNISFDDFKNVKQQAKGRENVAKERAKAVIGLYLTVMYLLVKNLVNVNARYVIAIHCLERDFG
LYKEIIPELASKNLKNDYRILSQTLCELCDDRDESPNLFLKKNKRLRKCVEVDINNADSSMTRKYRNCIAHLTVVRELKEYIGD
IRTVDSYFSIYHYVMQRCITKREDDKKQEEKIKFEDDLLKNHGYTKDFVKALNSPFGYNIPRFKNLSIEQLFDRNEYLTEK
(SEQ ID NO: 319)
>ODLN01002572_7
[human metagenome]
MAKKNKMKPRELREAQKKARQLKAAEINNNAVPAIAAMPAAEVIAPAAEKKKSSVKAAGMKSILVSENKMYITSFGKGNSAVLE
YEVDNNDYNKTQLSSKDNSNIELGNVNEVNITFSSKHGFESGVEINTSNPTHRSGESSPVRWDMLGLKSELEKRFFGKTFDDNI
HIQLIYNILDIEKILAVYVTNIVYALNNMLGEGDESNYDFMGYLSTFNTYKVFTNPNGSTLSDDKKENIRKSLSKFNALLKTKR
LGYFGLEEPKTKDTRVLEAYKKRVYHMLAIVGQIRQCVFHDLSEHSEYDLYSFIDNSKKVYRECRETLDYLVDERFDSINKGFI
QGNKVNISLLIDMMKGYEADDIIRLYYDFIVLKSQKNLGFSIKKLREKILDEYGFRFKDKQYDSVRSKMYKLMDFLLFCNYYRN
DIAAGESLVRKLRFSMTDDEKEGIYADEAAKLWGKFRNDFENIADHMNGDVIKELGKADMDFDEKILDSEKKNASDLLYFSKMI
YMLTYFLDGKEINDLLTTLISKFDNIKEFLKIMKSSAVDVECELTAGYKLFNDSQRITNELFIVKNIASMRKPAASAKLTMFRD
ALTILGIDDKITDDRISEILKLKEKGKGIHGLRNFITNNVIESSRFVYLIKYANAQKIREVAKNEKVVMFVLGGIPDTQIERYY
KSCVEFPDMNSSLEAKRSELARMIKNISFDDFKNVKQQAKGRENVAKERAKAVIGLYLTVMYLLVKNLVNVNARYVIAIHCLER
DFGLYKEIIPELASKNLKNDYRILSQTLCELCDDRDESPNLFLKKNRRLRKCVEVDINNADSSMTRKYRNCIAHLTVVRELKEY
IGDIRTVDSYFSIYHYVMQRCITKREDDTKQEEKIKYEDDLLKNHGYTKDFVKALNSPFGYNIPRFKNLSIEQLFDRNEYLTEK
(SEQ ID NO: 320)
>ODQJ01000729_25
[human metagenome]
MAKKNKMKPRELREAQKKARQLKAAEINNNAVPAIAAMPAAEVIAPAAEKKKSSVKAAGMKSILVSENKMYITSFGKGNSAVLE
YEVDNNDYNKTQLSSKGSSNIELHGVNEINITFSSKHGFESGVEINTSNPTHRSGESSPVRWDMLGLKSELEKRFFGKTFDDNI
HIQLIYNILDIEKILAVYVTNIVYALNNMLGIKDSESYDDFMGYLSAKNTYEVFTHPDKSNLSDKVKGNIKKSFSTFNDLLKTK
RLGYFGLEEPKTKDTRVSQAYKKRVYHMLAIVGQIRQSVFHDKSSKLDEDLYSFIDIIDSEYRETLDYLVDERFDSINKGFIQG
NKVNISLLIDMMKGYEADDIIRLYYDFIVLKSQKNLGFSIKKLREKMLDEYGFRFKDKQYDSVRSKMYKLMDFLLFCNYYRNDV
AAGEALVRKLRFSMTDDEKEGIYADEAAKLWGKFRNDFENIADHMNGDVIKELGKADMDFDEKILDSEKKNASDLLYFSKMIYM
LTYFLDGKEINDLLTTLISKFDNIKEFLKIMKSSAVDVECELTAGYKLFNDSQRITNELFIVKNIASMRKPAASAKLTMFRDAL
TILGIDDNITDDRISEILKLKEKGKGIHGLRNFITNNVIESSRFVYLIKYANAQKIREVAKNEKVVMFVLGGIPDTQIERYYKS
CVEFPDMNSSLGVKRSELARMIKNISFDDFKNVKQQSKGRENVAKERAKAVIGLYLTVMYLLVKNLVNVNARYVIAIHCLERDF
GLYKEIIPELASKNLKNDYRILSQTLCELCDKSPNLFLKKNERLRKCVEVDINNADSSMTRKYRNCIAHLTVVRELKEYIGDIC
TVDSYFSIYHYVMQRCITKRENDTKQEEKIKYEDDLLKNHGYTKDFVKALNSPFGYNIPRFKNLSIEQLFDRNEYLTEK (SEQ
ID NO: 321)
>ODUN01000242_23
[human metagenome]
MAKKNKMKPRELREAQKKARQLKAAEINNNAAPAIAAMPAAEVIAPAAEKKKSSVKAAGMKSILVSENKMYITSFGKGNSAVLE
YEVDNNDYNKTQLSSKDNSNIELGDVDEVNITFSSKHGFGSGVEINTSNPTHRSGESSPVRWDMLGLKSELEKRFFGKTFDDNI
HIQFIYNILDIEKILAVYVTNIVYALNNMLGIKDSESYDDFIGYLSARNTYKVFTHPDKSNLSDKAKGNIKKSFSTFNDLLKTK
RLGYFGLEEPKTKDTRVLEAYKKRVYYMLAIVGQIRQCVFHDLSEHSEYDLYSFIDNSKKVYRECRETLDYLVDERFDSINKGF
IQGNKVNISLLIDMMKGYEADDIIRLYYDFIVLKSQKNLGFSIKKLREKMLDEYGFRFKDKQYDSVRSKMYKLMDFLLFCNYYR
NDVVAGEALVRKLRFSMTDDEKEGIYADEAAKLWVKFRNDFENIADHMNGDVIKELGKADMDFDEKILDSEKKNASDLLYFSKM
IYMLTYFLDGKEINDLLTTLISKFDNIKEFLKIMKSSAVDVECELTAGYKLFNDSQRITNELFIVKNIASMRKPAASAKLTMFR
DALTILGIDDNITDDRISEILKLKEKGKGIHGLRNFITNNVIESSRFVYLIKYANAQKIREVAENEKVVMFVLGGIPDTQIERY
YKSCVEFPDMNSSLEVKRSELARMIKNISFDDFKNVKQQAKGRENVAKERAKAVIGLYLTVMYLLVKNLVNVNARYVIAIHCLE
RDFGLYKEIIPELASKNLKNDYRILSQTLCELCDKSPNLFLKKNERLRKCVEVDINNADSSMTRKYRNCIAHLTVVRELKEYIG
DIRTVDSYFSIYHYVMQRCITKREDDTKQEEKIKYEDDLLKNHGYTKDFVKALNSPFGYNIPRFKNLSIEQLFDRNEYLTEK
(SEQ ID NO: 322)
>ODVQ01003982_3
[human metagenome]
MAKKNKMKPRELREAQKKARQLKAAEINNNAAPAIAAMPAAEVIAPAAEKKKSSVKAAGMKSILVSENKMYITSFGKGNSAVLE
YEVDNNDYNKTQLSSKDSSNIELRGVNEVNITFSSKHGFGSGVEINTSNPTHRSGESSPVRWDMLGLKSELEKRFFGKTFDDNI
HIQLIYNILDIEKILAVYVTNIVYALNNMLGIKKSESHDDFMGYLSAKNTYDVFTNPNGSTLSDDKKKNIRKSLRKFNDLLKTK
RLGYFGLEEPKTKDTRVSQAYKKRVYHMLAIVGQIRQSVFHDKSSKLHEDLYSFIDIIDSEYRETLDYLVDERFDSINKGFIQG
NKVNISLLIDMMKGYEADDIIRLYYDFIVLKSQKNLGFSIKKLREKMLDEYGFRFKDKQYDSVRSKMYKLMDFLLFCNYYRNDV
AAGEALVRKLRFSMTDDEKEGIYADEAAKLWGKFRNDFENIADHMNGDVIKELGKADMDFDEKIIDSEKKNASDLLYFSKMIYM
LTYFLDGKEINDLLTTLISKFDNIKEFLKIMKSSAVDVECELTAGYKLFNDSQRITNELFIVKNIASMRKPASSAKLTMFRDAL
TILGIDDNITDDRISEILKLKEKGKGIHGLRNFITNNVIESSRFVYLIKYANAQKIRKVAKNEKVVMFVLGGIPDTQIERYYKS
CVEFPDMNSSLEVKRSELARMIKNISFDDFKNVKQQAKGRENVAKERAKAVIGLYLTVMYLLVKNLVNVNARYVIAIHCLERDF
GLYKEIIPELASKNLKNDYRILSQTLCELCDESPNLFLKKNERLRKCVEVDINNADSSMTRKYRNCIAHLTVVRELKEYIGDIR
TVDSYFSIYHYVMQRCITKREDDKKQEEKIKFEDDLLKNHGYTKDFVKALNSPFGYNIPRFKNLSIEQLFDRNEYLTEK (SEQ
ID NO: 323)
>ODVR01002077_3
[human metagenome]
MAKKNKMKPRELREAQKKARQLKAAEINNNAAPAIAAMPAAEAAAPAAEKKKSSVKAAGMKSILVSENKMYITSFGKGNSAVLE
YEVDNNDYNKTQLSSKDSSNIELHGVNEVNITFSSKHGFESGVEINTSNPTHRSGESSPVRGDMLGLKSELEKRFFGKTFDDNI
HIQLIYNILDIEKILAVYVTNIVYALNNMLGVKGSESYDDFMGYLSAQNTYYIFTHPDKSNLSDKVKGNIKKSLSKFNDLLKTK
RLGYFGLEEPKTKDKRVSEAYKKRVYHMLAIVGQIRQSVFHDKSSKLDEDLYSFIDIIDSEYRETLDYLVDERFDSINKGFIQG
NKVNISLLIDMMKGYEADDIIRLYYDFIVLKSQKNLGFSIKKLREKMLDEYGFRFKDKQYDSVRSKMYKLMDFLLFCNYYRNDV
VAGEALVRKLRFSMTDDEKEGIYADEAAKLWGKFRNDFENIADHMNGDVIKELGKADMDFDEKILDSEKKNASDLLYFSKMIYM
LTYFLDGKEINDLLTTLISKFDNIKEFLKIMKSSAVDVECELTAGYKLFNDSQRITNELFIVKNIASMRKPAASAKLTMFRDAL
TILGIDDKITDDRISEILKLKEKGKGIHGLRNFITNNVIESSRFVYLIKYANAQKIREVAKNEKVVMFVLGGIPDTQIERYYKS
CVEVPDMNSSLEVKRSELARMIKNISFDDFKNVKQQAKGRENVAKERAKAVIGLYLTVMYLLVKNLVNVNARYVIAIHCLERDF
GLYKEIIPELASKNLKNDYRILSQTLCELCDDRDKSSNLFLKKNKRLRKCVEVDINNADSRMTRKYRNCIAHLTVVRELKEYIG
DIRTVDSYFSIYHYVMQRCITKREDDTKREEKIKYEDDLLKNHGYTKDFVKALNSPFGYNIPRFKNLSIEQLFDRNEYLTEK
(SEQ ID NO: 324)
>ODXC01000747_3
[human metagenome]
MAKKNKMKPRELREAQKKARQLKAAEINNNAAPAIAAMPAAEAAAPAAEKKKSSVKAAGMKSILVSENKMYITSFGKGNSAVLE
YEVDNNDYNKTQLSSKGSSNIELHGVNEVNITFSSKHGFESGVEINTSNPTHRSGESSPVRGDMLGLKSELEKRFFGKTFDDNI
HIQLIYNILDIEKILAVYVTNIVYALNNMLGEGDDESHDDFMGYLSTFNTYKVFTNPNGSTLSDDKKENIRKSLSKFNALLKTK
RLGYFGLEEPKTKDTRASEAYKKRVYHMLAIVGQIRQSVFHDKSNELDEYLYSFIDIIDSEYRETLDYLIDERFDSINKGFIQG
NKVNISLLIDMMKGYEADDIIRLYYDFIVLKSQKNLGFSIKKLREKMLDEYGFRFKDKQYDSVRSKMYKLMDFLLFCNYYRNDV
VAGESLVRKLRFSMTDDEKEGIYADEAEKLWGKFRNDFENIADHMNGDVIKELGKADMDFDEKILDSEKKNASDLLYFSKMIYM
LTYFLDGKEINDLLTTLISKFDNIKEFLKIMKSSAVDVECELTAGYKLFNDSQRITNELFVVKNIASMRKPAASAKLTMFRDAL
TILGIDDKITDDRISEILKLKEKGKGIHGLRNFITNNVIESSRFVYLIKYANAQKIREVAKNEKVVMFVLGGIPDTQIERYYKS
CVEFPDMNSSLEAKRSELARMIKNISFDDFKNVKQQAKGRENVAKERAKAVIGLYLTVMYLLVKNLVNVNARYVIAIHCLERDF
GLYKEIIPELASKNLKNDYRILSQTLCELCDDRDESPNLFLKKNERLRKCVEVDINNADSSMTRKYRNCIAHLTVVRELKEYIG
DIRTVDSYFSIYHYVMQRCITKRENDTKQEEKIKYEDDLLKNHGYTKDFVKALNSPFGYNIPRFKNLSIEQLFDRNEYLTEK
(SEQ ID NO: 325)
>ODXO01005124_2
[human metagenome]
MAKKNKMKPRELREAQKKARQLKAVEINNNAVPEIAAMPAAEVIAPVAEKKKSSVKAAGMKSILVSENKMYITSFGKGNSAVLE
YEVDNNDYNKTQLSSKDNSNIELCDVDEVNITFSSKHGFESGVKINTSNPTHRSGESSSVRGDMLGLKSELEKRFFGKTFDDNI
HIQLIYNILDIEKILAVYVTNIVYALNNMLGVKDSESYDDFMGYLSAKNTYDVFTDPDESDLSKNIKGNIKKSLSKFNALLKTK
RLGYFGLEEPKTKDTRASEAYKKRVYHMLAIVGQIRQCVFHDKSGAKRFDLYSFINNIDPEYRETLDYLVDERFDSINKGFIQG
NKVNISLLIDMMKGYEADDIIRLYYDFIVLKSQKNLGFSIKKLREKMLDEYGFRFKDKQYDSVRSKMYKLMDFLLFCNYYRNDI
AAGESLVRKLRFSMTDDEKEGIYADEAAKLWGKFRNDFENIADHMNGDVIKELGKADMDFDEKILDSEKKNASDLLYFSKMIYM
LTYFLDGKEINDLLTTLISKFDNIKEFLKIMKSSAVDVECELTAGYKLFNDSQRITNELFIVKNIASMRKPAASAKLTMFRDAL
TILGIDDKITDDRISEILKLKEKGKGIHGLRNFITNNVIESSRFVYLIKYANAQKIREVAKNEKVVMFVLGGIPDTQIERYYKS
CVEFPDMNSSLKVKRSELARMIKNIRFDDFKNVKQQAKGRENVAKERAKAVIGLYLTVMYLLVKNLVNVNARYVIAIHCLERDF
GLYKEIIPELASKNLKNDYRILSQTLCELCDDRDESPNLFLKKNRRLRKCVEVDINNADSSMTRKYRNCIAHLTVVRELKEYIG
DIRTVDSYFSIYHYVMQRCITKREDDTKQEEKIKYEDDLLKNHGYTKDFVKALNSPFGYNIPRFKNLSIEQLFDRNEYLTEK
(SEQ ID NO: 326)
>ODYC01000377_16
[human metagenome]
MAKKNKMKPRELREAQKKARQFKAAEINNNAAPAIAAMPAAEVIAPVAEKKKSSVKAAGMKSILVSENKMYITSFGKGNSAVLE
YEVDNNDYNKTQLSSKDNSNIELCGVNEVNITFSSKHGFESGVEINTSNPTHRSGESSPVRWDMLGLKSELEKRFFGKTFDDNI
HIQLIYNILDIEKILAVYVTNIVYALNNMLGEGDESNYDFMGYLSTFNTYKVFTNPNGSTLSDDKKENIRKSLSKFNALLKTKR
LGYFGLEEPKTKDTRVLEAYKKRVYHMLAIVGQIRQCVFHDLSEHSEYDLYSFIDNSKKVYRECRETLDYLVDERFDSINKGFI
QGNKVNISLLIDMMKGYEADDIIRLYYDFIVLKSQKNLGFSIKKLREKILDEYGFRFKDKQYDSVRSKMYKLMDFLLFCNYYRN
DIAAGESLVRKLRFSMTDDEKEGIYADEAAKLWGKFRNDFENIADHMNGDVIKELGKADMDFDEKILDSEKKNASDLLYFSKMI
YMLTYFLDGKEINDLLTTLISKFDNIKEFLKIMKSSAVDVECELTAGYKLFNDSQRITNELFIVKNIASMRKPAASAKLTMFRD
ALTILGIDDNITDDRISEILKLKEKGKGIHGLRNFITNNVIESSRFVYLIKYANAQKIREVAKNEKVVMFVLGGIPDTQIERYY
KSCVEFPDMNSSLEVKRSELARMIKNIRFDDFKNVKQQAKGRENVAKERAKAVIGLYLTVMYLLVKNLVNVNARYVIAIHCLER
DFGLYKEIIPELASKNLKNDYRILSQTLCELCDNRDESPNLFLKKNKRLRKCVEVDINNADSSMTRKYRNCIAHLTVVRELKEY
IGDIRTVDSYFSIYHYVMQRCITKREDDTKQEDKIKYEDDLLKNHGYTKDFVKALNSPFGYNIPRFKNLSIEQLFDRNEYLTEK
(SEQ ID NO: 327)
>OEJW01000623_11
[human metagenome]
MAKKNKMKPRELREAQKKARQLKAAEINNNAAPAIAAMPAAEVIAPAAEKKKSSVKAAGMKSILVSENKMYITSFGKGNSAVLE
YEVDNNDYNQTQLSSDGSSNIELRGVNEVNITFSSKHGFESGVEINTSNPTHRSGESSPVRGDMLGLKSELEKRFFGKTFDDNI
HIQLIYNILDIEKILAVYVTNIVYALNNMLGVKGSESYDDFMGYLSAQNTYYIFTHPDKSNLSDKVKGNIKKSLSKFNDLLKTK
RLGYFGLEEPKTKDKRVSEAYKKRVYHMLAIVGQIRQSVFHDKSNELDEYLYSFIDIIDSEYRDTLDYLVDERFDSINKGFVQG
NKVNISLLIDMMKGYEVDDIIRLYYDFIVLKSQKNLGFSIKKLREKMLDEYGFRFKDKQYDSVRSKMYKLMDFLLFCNYYRNDV
VAGESLVRKLRFSMTDDEKEGIYADEAAKLWGKFRNDFENIADHMNGDVIKELGKADMGFDEKILDSEKKNASDLLYFSKMIYM
LTYFLDGKEINDLLTTLISKFDNIKEFLKIMKSSAVNVECELTAGYKLFNDSQRITNELFIVKNIASMRKPAASAKLTMFRDAL
TILGIDDKITDDRISEILKLKEKGKGIHGLRNFITNNVIESSRFVYLIKYANAQKIREVAKNEKVVMFVLGGIPDTQIERYYKS
CVEFPDMNSSLKAKRSELARMIKNISFEDFKDVKQQAKGRENVAKERAKAVIGLYLTVMYLLVKNLVNVNARYVIAIHCLERDF
GLYKEIIPELASKNLKNDYRILSQMLCELCDDRDKSPNLFLKKNKRLRKCVEVDINNADSSMTRKYRNCIAHLTVVRELKEYIG
DIYAVDSYFSIYHYVMQRCITKRENDTKQEEKIKYEDNLLKNHGYTKDFVKALNSPFGYNIPRFKNLSIEQLFDRNEYLTEK
(SEQ ID NO: 328)
>33000193761Ga0187899_10021543_4
[mammals-digestive system-feces]
MNKIHKKQGKTTAKSLGLKSVLKIENDLVVTTFGKKDNPMVVEQSINKASGEKELYVDEDQVKFDSSLIKEKNILSLDSIQHSN
HQIIVNIDQKDASEIGMDYLRLKPELEKEFFGKTFYDNVHIQIAYNLLDLKKIIGLHIGNAIQALENLGRDGSDLVGICDATKP
LNYLDDVKQKADIGFMNRLKPYFMYFDGVLKLDNSKNKNGELNQLDIENWDVIRILSLIRQGCAHAGAYSSLLYTAQNNKVYAD
LINKALSIFSDDLDKFNKSFLKQSKMNLFILFDLYNCRFDRSLQEKIIKEYYRYVLYKDNKNLGFSLKNVRNLIIEGKYDEQER
SGKLQTIRSKLNTLLDFYLYGYYQKNPTFVENIVAKLRESKNDEDKEKVYEEEYHRLLSENNYLVDKKCSDIVYRINEAVKNRK
IFVNANINAVVEKVSCSCFPSLIYVLCKFLDGKEVNELTTAIINKLENIASLINALVTLKSYGGFSEQYKIFDYPNINGLIDDF
RMVKNLTSTKRKLKKASGGEDRIGRQLYADAINIFKEDSFVSANDEKGTGLDQYVNKFFSKDDLGARKVRNLLLNNIIKNRRFV
YLIKYIDPKDCYKLVHNEKIVRFALGQYDESQMPLNQLQKYYDAVIENREGFRKCNDRKKIIDTLVSEINRVSIDGILDIGNRL
VNRGNNDYINHQKQIISLYLTIAYLIVKGVVHTNSLYFIAWHAYERDNNFKFGNDGKDYLALTKEYLTNKKKRVKQLLDHNIEE
ANNSLDSKYFSAYRNKVVHLNFCNIFVNYLDGIGDIHSYYDIYQYVIQKWSIAERSKDFIDPQYLTKLSNDLKQYRTYQRNFLK
IINLPFAYNLARYKNLTIGDLFNDKYPLPKETVKEFYNEE (SEQ ID NO: 329)
>OGCZ01001955_1
[metagenome]
MAKKNKMKPRELREAQKKARQLKAAEINNNAAPAIAAMPAAQVIAPAAEKKKSSVKAAGMKSILVSENKMYITSFGKGNSAVLE
YEVDKVDNNNYNKTQLSSKDNSNIELGDVNEVNITFSSKHGFESGVEINTSNPTHRSGESSPVRWDMLGLKSELEKRFFGKTFD
DNIHIQLIYNILDIEKILAVYVTNIVYALNNMLGIKGSESYDDFMGYLSARNTYEVFTHPDKSNLSDKVKGNIKKSFSTFNDLL
KTKRLGYFGLEEPKTKDTRVSEAYKKRVYHMLAIVGQIRQCVFHDLSEHSEYDLYSFIDNSKKVYRECRETLNYLVDERFDSIN
KGFIQGNKVNISLLIDMMKDDYEADDIIHLYYDFIVLKSQKNLGFSIKKLREKMLDEYGFRFKDKQYDSVRSKMYKLMDFLLFC
NYYRNDVVAGEALVRKLRFSMTDDEKEGIYADEAEKLWGKFRNDFENIADHMNGDVIKELGKADMDFDEKILDSEKKNASDLLY
FSKMIYMLTYFLDGKEINDLLTTLISKFDNIKEFLKIMKSSAVDVECELTAGYRLFNDSQRITNELFIVKNIASMRKPAASAKL
TMFRDALTILGIDDKITDDRISEILKLKEKGKGIHGLRNFITNNVIESSRFVYLIKYANAQKIREVAKNEKVVMFVLGGIPDTQ
IERYYKSCVEFPDMNSSLEAKRSELARMIKNISFDDFKNVKQQAKGRENVAKERAKAVIGLYLTVMYLLVKNLVNVNARYVIAI
HCLERDFGLYKEIIPELASKNLKNDYRILSQTLCELCDESPNLFLKKNERLRKCVEVDINNADSSMTRKYRNCIAHLTVVRELK
EYIGDIRTVDSYFSIYHYVMQRCITKREDDKKQEEKIKFEDDLLKNHGYTKDFVKALNSPFGYNIPRFKNLSIEQLFDRNEYLT
EK (SEQ ID NO: 330)
>OGDY01002059_17
[metagenome]
MGKKIHARDLREQRKTDRTEKFADQNKKREAERAVQKKDAAVSVKSVSSVSSKKDNVTKSMAKAAGVKSVFAVGNTVYMTSFGR
GNDAVLEQKIVDTSHEQLNIDDPAYQLNVVTMNGYSVTGHRGETVSAVTDNPLRRFNGGKKDEPEQSVPTDMLCLKPTLEKKFF
GKEFNDNIHIQLIYNILDIEKILAVYSTNAIYALNNMSADENIENSDFFMKRTTDETFDDFEKKKESTNSREKADFDAFEKFIG
NYRLAYFADAFYVNKKNPKGKAKNVLREDKELYSVLTLIGKLRHWCVHSEEGRAEFWLYKLNELKDDFKNVLDVVYNRPVEEIN
NRFIENNKVNIQILGSVYKNTDIAELVRSYYEFLITKKYKNMGFSIKKLRESMLEGKGYADKEYDSVRNKLYQMTDFILYTGYI
NEDSDRADDLVNTLRSSLKEDDKTTVYCKEADYLWKKYRESIREVADALDGDNIKRLSKSNIEIQEDKLRKCFISYADSVSEFT
KLIYLLTRFLSGKEINDLVTTLINKFDNIRSFLEIMDELGLDRTFTAEYSFFEGSTKYLAELVELNSFVKSCSFDINAKRTMYR
DALDILGIKSGKTEEDIEKMIDNILQIDANGDKKLKKNNGLRNFIASNVIDSNRFKYLVRYGNPKKIRETAKCKPAVRFVLNEI
PDAQIERYYEACCPENTALCSANKKREKLADMIAEIEFENFSDAGNYQKANVTSKTHEAEIKRKNQSIIRLYLTVMYIMLKNLV
NVNARYVIAFHCVERDTKLYAESGLEVGNIEKNKTNLTMAVMGVKLENGIIKTEFDKSLAENAANRYLRNARWYKLILDNLKKS
ERAVVNEFRNTVCHLNAIRNINIKEIKEVENYFALYHYLIQKHLENRFADKKVERDTGDFISKLEEHKTYCKDFVKAYCTPFGY
NLVRYKNLTIDGLFDKNYPGKDDSDKQK (SEQ ID NO: 331)
>OGEU01000713_24
[metagenome]
MAKKNKMKPRELREAQKKARQLKAAEINNNAVPAIAAMPAAEVIAPAAEKKKSSVKAAGMKSILVSENKMYITSFGKGNSAVLE
YEVDKVDDNDYNKTQLSSKDNSNIELGNVNEVNITFSSRRGFESGVEINTSNPTHRSGESSSVRGDMLGLKSELEKRFFGKTFD
DNIHIQLIYNILDIEKILAVYVTNIVYALNNMLGVKGSESYDDFMGYLSAQNTYYIFTHPDKSNLSDKVKGNIKKSLSKFNDLL
KTKRLGYFGLEEPKTKDKRVSEAYKKRVYHMLAIVGQIRQSVFHDKSNELDEYLYSFIDIIDSEYRDTLDYLVDERFDSINKGF
IQGNKVNISLLIDMMKDDYEADDIIRLYYDFIVLKSQKNLGFSIKKLREKMLEEYGFRFKDKQYDSVRSKMYKIMDFLLFCNYY
RNDVVAGEALVRKLRFSMTDDEKEGIYADEAAKLWGKFRNDFENIADHMNGDVIKELGKADMDFDEKILDSEKKNASDLLYFSK
MIYMLTYFLDGKEINDLLTTLISKFDNIKEFLKIMKSSAVDVECELTAGYKLFNDSQRITNELFIVKNIASMRKPAASAKLTMF
RDALAILGIDDKITDDRISEILKLKEKGKGIHGLRNFITNNVIESSRFVYLIKYANAQKIREVAKNEKVVMFVLGGIPDTQIER
YYKSCVEVPDMNSSLEAKRSELARMIKNIRFDDFKNVKQQAKGRENVAKERAKAVIGLYLTVMYLLVKNLVNVNARYVIAIHCL
ERDFGLYKEIIPELASKNLKNDYRILSQTLCELCDKSPNLFLKKNERLRKCVEVDINNADSSMTRKYRNCIAHLTVVRELKEYI
GDIRTVDSYFSIYHYVMQRCITKRENDTKQEDKIKYEDDLLKNHGYTKDFVKALNSPFGYNIPRFKNLSIEQLFDRNEYLTEK
(SEQ ID NO: 332)
>OGFM01002125_3
[metagenome]
MAKKNKMKPRELREAQKKARQLKAAEINNNAAPAIAAMPAAEAAAPAAEKKKSSVKAAGMKSILVSENKMYITSFGKGNSAVLE
YEVDKVDNNDYNQTQLSSKGSSNIELHGVNEVNITFSSKHGFESGVEINTSNPTHRSGESSPVRWDMLGLKSELEKRFFGKTFD
DNIHIQLIYNILDIEKILAVYVTNIVYALNNMLGIKDSESYDDFMGYLSAKNTYDVFTDPDESDLSKNIKGNIKKSFSTFNDLL
KTKRLGYFGLEEPKTKDTRVSEAYKKRVYHMLAIVGQIRQCVFHDLSEHSEYDLYSFIDNSKKVYRECRETLNYLVDERFDSIN
KGFIQGNKVNISLLIDMMKGYEADDIIRLYYDFIVLKSQKNLGFSIKKLREKMLDEYGFRFKDKQYDSVRSKMYKLMDFLLFCN
YYRNDVVAGEALVRKLRFSMTDDEKEGIYADEAAKLWGKFRNDFENIADHMNGDVIKELGKADMDFDEKILDSEKKNASDLLYF
SKMIYMLTYFLDGKEINDLLTTLISKFDNIKEFLKIMKSSAVDVECELTAGYKLFNDSQRITNELFVVKNIASMRKPAASAKLT
MFRDALTILGIDDKITDDRISEILKLKEKGKGIHGLRNFITNNVIESSRFVYLIKYANAQKIREVAKNEKVVMFVLGGIPDTQI
ERYYKSCVEFPDMNSSLEAKRSELARMIKNISFDDFKNVKQQAKGRENVAKERAKAVIGLYLTVMYLLVKNLVNVNARYVIAIH
CLERDFGLYKEIIPELASKNLKNDYRILSQTLCELCDDRDESPNLFLKKNERLRKCVEVDINNADSSMTRKYRNCIAHLTVVRE
LKEYIGDIRTVDSYFSIYHYVMQRCITKREDDTKQEEKIKYEDDLLKNHGYTKDFVKALNSPFGYNIPRFKNLSIEQLFDRNEY
LTEK (SEQ ID NO: 333)
>OGHWO1002048_1
[metagenome]
MAKKNKMKPRELREAQKKARQLKAAEINNNAVPAIAAMPAAEVIAPAAEKKKSSVKAAGMKSILVSENKMYITSFGKGNSAVLE
YEVDKVDNNNYNKTQLSSESSSNIELCGVTKVNITFSSKHGFGSGVEINTSNPTHRSGESSPVRWDMLGLKSELEKRFFGKTFD
DNIHIQLIYNILDIEKILAVYVTNIVYALNNMLGVKGSESYDDFMGYLSAQNTYYIFTHPDKSNLSDKVKGNIKKSLSKFNDLL
KTKRLGYFGLEEPKTKDTRVSQAYKKRVYHMLAIVGQIRQCVFHDKSGAKRFDLYSFINNIDPEYRDTLDYLVDERFDSINKGF
IQGNKVNISLLIDMMKGYEVDDIIRLYYDFIVLKSQKNLGFSIKKLREKMLDEYGFRFKDKQYDSVRSKMYKLMDFLLFCNYYR
NDVAAGEALVRKLRFSMTDDEKEGIYADEAEKLWGKFRNDFENIADHMNGDAIKELGKADMDFDEKILDSEKKNASDLLYFSKM
IYMLTYFLDGKEINDLLTTLISKFDNIKEFLKIMKSYAVDVECELTAGYKLFNDSQRITNELFIVKNIASMRKPAASAKLTMFR
DALTILGIDDNITDDRISEILKLKEKGKGIHGLRNFITNNVIESSRFVYLIKYANAQKIREVAKNEKVVMFVLGGIPDTQIERY
YKSCVEFPDMNSSLEAKRSELARMIKNIRFDDFKNVKQQAKGRENVAKERAKAVIGLYLTVMYLLVKNLVNVNARYVIAIHCLE
RDFGLYKEIIPELASKNLKNDYRILSQKLCELCDKSPNLFLKKNERLRKCVEVDINNADSIMTRKYRNCIAHLTVVRELKEYIG
DIRTVDSYFSIYHYVMQRCITKRENDTKQEDKIKYEDDLLKNHGYTKDFVKALNSPFGYNIPRFKNLSIEQLFDRNEYLTEK
(SEQ ID NO: 334)
>OGIE01002059_21
[metagenome]
MAKKNKMKPRELREAQKKARQLKAAEINNNAAPAIAAMPAAEVIAPAAEKKKSSVKAAGMKSILVSENKMYITSFGKGNSAVLE
YEVDKVDNNNYNKTQLSSKDNSNIELGDVNEVNITFSSKRGNESGVEINTSNPTHRSGESSPVRWDMLGLKSELEKRFFGKTFD
DNIHIQLIYNILDIEKILAVYVTNIVYALNNMLGIKKSESYDDFMGYLSARNTYEVFTHPDKSNLSDKAKGNIKKSFSTFNDLL
KTKRLGYFGLEEPKTKDTRVSQAYKKRVYHMLAIVGQIRQSVFHDKSSKLDEDLYSFIDIIDSEYRETLDYLVDERFDSINKGF
IQGNKVNISLLIDMMKGYETDDIIRLYYDFIVLKSQKNLGFSIKKLREKMLDEYGFRFKDKQYDSVRSKMYKLMDFLLFCNYYR
NDVVAGEALVRKLRFSMTDDEKEGTYADEAEKLWGKFRNDFDNIAGHMNGDAIKELGKADMDFDEKILDSEKKNASDLLYFSKM
IYMLTYFLDGKEINDLLTTLISKFDNIKEFLKIMKSSAVDVECELTAGYKLFNDSQRITNELFIVKNIASMRKPAASAKLTMFR
DALTILGIDDKITDDRISEILKLKEKGKGIHGLRNFITNNVIESSRFVYLIKYANAQKIREVAKNEKVVMFVLGGIPDTQIERY
YKSCVEFPDMNSSLEAKRSELARMIKNIRFDDFKNVKQQAKGRENVAKERAKAVIGLYLTVMYLLVKNLVNVNARYVIAIHCLE
RDFGLYKEIIPELASKNLKNDYRTLSQTLCGLCDKSPNLFLKKNKRLRKCVEVDINNADSIMTRKYRNCIAHLTVVRELKEYIG
DIRTVDSYFSIYHYVMQRCITKREDDTKQEEKIKYEDDLLKNHGYTKDFVKALNSPFGYNIPRFKNLSIEQLFDRNEYLTEK
(SEQ ID NO: 335)
>OGJI01000038_151
[metagenome]
MAKKNKMKPRELREAQKKARQLKAAEINNNAAPAIAAMPAAEVIAPAAEKKKSSVKAAGMKSILVSENKMYITSFGKGNSAVLE
YEVDKVDNDDYNKTQLSSKGSSNIELHGVNEVNITFSSKHGFESGVEISTSNPTHRSGESSPVRWDMLGLKSELEKRFFGKTFD
DNIHIQFIYNILDIEKILAVYVTNIVYALNNMLGVKDSESYDDFMGYLSARNTYKVFTHPDKSNLSDKVKGNIKKSFSTFNDLL
KTKRLGYFGLEEPKTKDTRVSQAYKKRVYHMLAIVGQIRQCVFHDKSSKLHEDLYSFINNIDPEYRDTLDYLVEERLKSINKDF
IEGNKVNISLLIDMMKDDYEADDIIRLYYDFIVLKSQKNLGFSIKKLREKMLDEYGFRFKDKQYDSVRSKMYKLMDFLLFCNYY
RNDVVAGEALVRKLRFSMTDDEKEGIYADEAAKLWGKFRNDFENIADHMNGDVIKELGKADMDFDEKILDSEKKNASDLLYFSK
MIYMLTYFLDGKEINDLLTTLISKFDNIKEFLKIMKSSAVDVECKLTAGYKLFNDSQRITNELFIVKNIASMRKPAASAKLTMF
RDALTILGIDDKITDDRISEILKLKEKGKGIHGLRNFITNNVIESSRFVYLIKYANAQKIREVAKNEKVVMFVLGGIPDTQIER
YYKSCVEFPDMNSSLEAKRSELARMIKNISFDDFKNVKQQAKGRENVAKERAKAVIGLYLTVMYLLVKNLVNVNARYVIAIHCL
ERDFGLYKEIIPELASKNLKNDYRILSQTLCELCDDRDESPNLFLKKNKRLRKCVEVDINNADSSMTRKYRNCIAHLTVVRELK
EYIGDIRTVDSYFSIYHYVMQRCITKRENDTKQEDKIKYEDDLLKNHGYTKDFVKALNSPFGYNIPRFKNLSIEQLFDRNEYLT
EK (SEQ ID NO: 336)
>OGJK01007642_2
[metagenome]
MAKKNKMKPRELREAQKKARQLKAAEINNNAAPAIAAMPAAEVIAPAAEKKKSSVKAAGMKSILVSENKMYITSFGKGNSAVLE
YEVDKVDNNNYNKTQLSSKDNSNIELGDVNEVNITFSSKRGNESGVEINTSNPTHRSGESSPVRWDMLGLKSELEKRFFGKTFD
DNIHIQLIYNILDIEKILAVYVTNIVYALNNMLGIKKSESYDDFMGYLSARNTYEVFTHPDKSNLSDKAKGNIKKSFSTFNDLL
KTKRLGYFGLEEPKTKDTRVSQAYKKRVYHMLAIVGQIRQSVFHDKSSKLDEDLYSFIDIIDSEYRETLDYLVDERFDSINKGF
IQGNKVNISLLIDMMKGYEADDIIRLYYDFIVLKSQKNLGFSIKKLREKMLEEYGYRFKDKQYDSVRSKMYKLMDFLLFCNYYR
NDVIAGEALVRKLRFSMTDDEKEGIYADEAAKLWGKFRNDFENIADHMNGDAIKELGKADMDFDEKILDSEKKYASDLLYFSKM
IYMLTYFLDGKEINDLLTTLISKFDNIKEFLKIMKSSAVDVECELTAGYKLFNDSQRITNELFIVKNIASMRKPAASAKLTMFR
DALTILGIDDNITDDRISEILKLKEKGKGIHGLRNFITNNVIESSRFVYLIKYANAQKIREVAKNEKVVMFVLGGIPDTQIERY
YKSCVEFPDMNSSLEAKRSELARMIKNISFDDFKNVKQQAKGRENVAKERAKAVIGLYLTVMYLLVKNLVNVNARYVIAIHCLE
RDFGLYKEIIPELASKNLKNDYRILSQTLCELCDERDKSPNLFLKKNERLRKCVEVDINNADSIMTRKYRNCIAHLTVVRELKE
YIGDIRTVDSYFSIYHYVMQRCITKREDDTKQEEKIKYEDDLLKNHGYTKDFVKALNSPFGYNIPRFKNLSIEQLFDRNEYLTE
K (SEQ ID NO: 337)
>OGJY01000516_18
[metagenome]
MAKKNKMKPRELREAQKKARQLKAAEINNNAAPAIAAMPAAEVIAPVAGKKKSSVKAAGMKSILVSENKMYITSFGKGNSAVLE
YEVDKVDNNDYNQTQLSSKGSSNIELCGVNEVNITFSSKHGFESGVEINTSNPTHRSGESSPVRWDMLGLKSELEKRFFGKTFD
DNIHIQLIYNILDIEKILAVYVTNIVYALNNMLGIKKSESYDDFMGYLSARNTYEVFTHPDKSNLSDKAKGNIKKSFSTFNDLL
KTKRLGYFGLEEPKTKDTRVSQAYKKRVYHMLAIVGQIRQSVFHDKSSKLDEDLYSFIDIIDSEYRETLDYLVEERLKSINKDF
IEGNKVNISLLIDMMKGFEADDIIRLYYDFIVLKSQKNLGFSIKKLREKMLEEYGYRFKDKQYDSVCSKMYKLMDFLLFCNYYR
NDVVAGEALVRKLRFSMTDDEKEGIYADEAAKLWGKFRNDFENIADHMNGDVIKELGKADMDFDEKILDSEKKNASDLLYFSKM
IYMLTYFLDGKEINDLLTTLISKFDNIKEFLKIMKSSAVDVECELTAGYKLFNDSQRITNELFIVKNIASMRKPAASAKLTMFR
DALTILGIDDKITDDRISEILKLKEKGKGIHGLRNFITNNVIESSRFVYLIKYANAQKIREVAKNEKVVMFVLGGIPDTQIERY
YKSCVEFPDMNSSLEVKRSELARMIKNISFDDFKNVKQQAKGRENVAKERAKAVIGLYLTVMYLLVKNLVNVNARYVIAIHCLE
RDFGLYKEIIPELASKNLKNDYRILSQTLCELCDDRDKSSNLFLKKNKRLRKCVEVDINNADSSMTRKYRNCIAHLTVVRELKE
YIGDIRTVDSYFSIYHYVMQRCITKREDDTKQEDKIKYEDNLLKNHGYTKDFVKALNSPFGYNIPRFKNLSIEQLFDRNEYLTE
K (SEQ ID NO: 338)
>OGKA01000617_2
[metagenome]
MAKKNKMKPRELREAQKKARQLKAAEINNNAVPAIAAMPAVEVIAPAAEKKKSSVKAAGMKSILVSENKMYITSFGKGNSAVLE
YEVDNNDYNKTQLSSKDNSNIELGNVNEVNITFSSRRGFESGVEINTSNPTHRSGESSSVRGDMLGLKSELEKRFFGKTFDDNI
HIQLIYNILDIEKILAVYVTNIVYALNNMLGVKGSESYDDFMGYLSAQNTYYIFTHPDKSNLSDKVKGNIKKSLSKFNDLLKTK
RLGYFGLEEPKTKDKRVSEAYKKRVYHMLAIVGQIRQSVFHDKSNELDEYLYSFIDIIDSEYRDTLDYLVDERFDSINKGFIQG
NKVNISLLIDMMKGYEADDIIRLYYDFIVLKSQKNLGFSIKKLREKMLDEYGFRFKDKQYDSVRSKMYKLMDFLLFCNYYRNDV
VAGEALVRKLRFSMTDDEKEGIYADEAAKLWGKFKNDFENIADHMNGDVIKEFGKADMDFDEKILDSEKKNASDLLYFSKMIYM
LTYFLDGKEINDLLTTLISKFDNIKEFLKIMKSSAVDVECELTAGYKLFNDSQRITNELFIVKNIASMRKPAASAKLTMFRDAL
TILGIDDNITDDRISEILKLKEKGKGIHGLRNFITNNVIESSRFVYLIKYANAQKIREVAKNEKVVMFVLGGIPDTQIERYYKS
CVEFPDMNSSLEAKRSELARMIKNIRFDDFKNVKQQAKGRENVAKERAKAVIGLYLTVMYLLVKNLVNVNARYVIAIHCLERDF
GLYKEIIPELASKNLKNDYRILSQTLCELCDKSPNLFLKKNERLRKCVEVDINNADSSMTRKYRNCIAHLTVVRELKEYIGDIR
TVDSYFSIYHYVMQRCITKRENDTKQEDKIKYEDDLLKNHGYTKDFVKALNSPFGYNIPRFKNLSIEQLFDRNEYLTEK (SEQ
ID NO: 339)
>OGKG01002483_14
[metagenome]
MGKKIHARDLREQRKTDRTEKFADQNKKREAERAVQKKDAAVSVKSVSSVSSKKDNVTKSMAKAAGVKSVFAVGNTVYMTSFGR
GNDAVLEQKIVDTSHEPLNIDDPAYQLNVVTMNGYSVTGHRGETVSAVTDNPLRRFNGGKKDEPEQSVPTDMLCLKPTLEKKFF
GKEFNDNIHIQLIYNILDIEKILAVYSTNAIYALNNMSADENIENSDFFMKRTTDETFDDFEKKKESTNSREKADFDAFEKFIG
NYRLAYFADAFYVNKKNPKGKARNVLREDKELYSVLTLIGKLRHWCVHSEEGRAEFWLYKLDELKDDFKNVLDVVYNRPVEEIN
NRFIENNKVNIQILGSVYKNTDIAELVRSYYEFLITKKYKNMGFSIKKLRESMLEGKGYADKEYDSVRNKLYQMTDFILYTGYI
NEDSDRADDLVNTLRSSLKEDDKTTVYCKEADYLWKKYRESIREVADALDVDNIKNLSGSNIEIRDNELRKCFISYADSVSEFT
KLIYLLTRFLSGKEINDLVTTLINKFDNIRSFLEILDELGLDRTFTAEYSFFEGSTKYLAELVELNSFVKSCSFDINAKRTMYR
DALDILGIKSGKTEEDIEKMIDNILQIDANGDKKLKKNNGLRNFIASNVIDSNRFKYLVRYGNPKKIRETAKCKPAVRFVLNEI
PDAQIERYYEACCPKNTALCSANKRREKLADMIAEIKFENFSDAGNYQKANVTSRTSEAEIKRKNQAIIRLYLTVMYIMLKNLV
NVNARYVIAFHCVERDTKLYAESGLEVGNIEKNKTNLTMAVIGVKLENGIIKTEFDKSLAENAANRYLRNARWYKLILDNLKKS
ERAVVNEFRNTVCHLNAIRNININIKEIKEVENYFALYHYLIQKHLENRFADKKVERDTGDFISKLEEHKTYCKDFVKAYCTPF
GYNLVRYKNLTIDGLFDKNYPGKDDSDKQK (SEQ ID NO: 340)
>OGKW01000585_4
[metagenome]
MAKKNKMKPRELREAQKKARQLKAAEINNNATPTIAAMPAAEVIAPAAEKKKSSVKAAGMKSILVSKNKMYITSFGKGNSAVLE
YEVDNNDYNQTQLSSKNSSNIELRGVNEVNITFSSKHGFESGVEINTSNPTHRSGESSSVRGDMLGLKSELEKRFFGKTFDDNI
HIQLIYNILDIEKILAVYVTNIVYALNNMLGEGDESNYDFMGYLSTFNTYKVFTNPNGSTLSDDKKENIRKSLSKFNALLKTKR
LGYFGLEEPKTKDTRASEAYKKRVYHMLAIVGQIRQCVFHDKSGAKRFDLYSFINNIDPEYRETLDYLVDERFDSINKGFIQGN
KVNISLLIDMMKGYEADDIIRLYYDFIVLKSQKNLGFSIKKLREKMLDEYGFRFKDKQYDSVRSKMYKIMDFLLFCNYYRNDVV
AGEALVRKLRFSMTDDEKEGIYADEAAKLWGKFRNDFENIADHMNGDVIKELGKADMDFDEKILDSEKKNASDLLYFSKMIYML
TYFLDGKEINDLLTTLISKFDNIKEFLKIMKSSAVNVECELTVGYKLFNDSQRITNELFIVKNIASMRKPAASAKLTMFRDALT
ILGIDDKITDDRISEILKLKEKGKGIHGLRNFITNNVIESSRFVYLIKYANAQKIREVAKNEKVVMFVLGGIPDTQIERYYKSC
VEFPDMNSSLEAKRSELARMIKNISFDDFKNVKQQAKGRENVAKERAKAVIGLYLTVMYLLVKNLVNVNARYVIAIHCLERDFG
LYKEIIPELVSKNLKNDYRILSQTLCELCDKSPNLFLKKNERLRKCVEVDINNADSVMTRKYRNCIAHLTVVRELKEYIGDIRT
VDSYFSIYHYVMQRCITKREDDTKQEEKIKYEDDLLKNHGYTKDFVKALNSPFGYNIPRFKNLSIEQLFDRNEYLTEK (SEQ
ID NO: 341)
>OGLJ01000192_54
[metagenome]
MAKKNKMKPRELREAQKKARQLKAAEINNNAAPAIAAMPAVEVIAPAAEKKKSSVKAAGMKSILVSENKMYITSFGKGNSAVLE
YEVDKMDNNNYNKTQLSSESSSNIKLCGVTKVNITFSSKHGFESGVEINTSNPTHRSGESSPVRWDMLGLKSELEKRFFGKTFD
DNIHIQLIYNILDIEKILAVYVTNIVYALNNMLGVKGSESHDDFIGYLSTNNTYDVFIDPDNSSLSDDKKANVRKSLSKFNALL
KTKRLGYFGLEEPKTKDNRVSEAYKKRVYHMLAIVGQIRQCVFHDKSGAKRFDLYSFINNIYPEYRETLDYLVDERFDSINKGF
IQGNKVNISLLIDMMKGYEADDIIRLYYDFIVLKSQKNLGFSIKKLREKMLDEYGFRFKDKQYDSVRSKMYKLMDFLLFCNYYR
NDVAAGEALVRKLRFSMTDDEKEGIYAGEAAKLWGKFRNDFENIADHMNGDVIKELGKADMDFDEKILDSEKKNASDLLYFSKM
IYMLTYFLDGKEINDLLTTLISKFDNIKEFLKIMKSSAVDVECELTAGYKLFNDSQRITNELFIVKNIASMRKPAASAKLTMFR
DALTILGIDDNITDDRISEILKLKEKGKGIHGLRNFITNNVIESSRFVYLIKYANAQKIREVAKNEKVVMFVLGGIPDTQIERY
YKSCVEVPDMNSSLEAKRSELARMIKNIRFDDFKNVKQQAKGRENVAKERAKAVIGLYLTVMYLLVKNLVNVNARYVIAIHCLE
RDFGLYKEIIPELASKNLKNDYRILSQTLCELCDDRDKSPNLFLKKNKRLRKCVEVDINNADSSMTRKYRNCIAHLTVVRELKE
YIGDIRTVDSYFSIYHYVMQRCITKRENDTKQEDKIKYEDDLLKNHGYTKDFVKALNSPFGYNIPRFKNLSIEQLFDRNEYLTE
K (SEQ ID NO: 342)
>OGLM01001314_21
[metagenome]
MGKKIHARDLREQRKTDRTEKFADQNKKREAERAVQKKDAAVSVKSVSSVSSKKDNVTKSMAKAAGVKSVFAVGNTVYMTSFGR
GNDAVLEQKIVDTSHEPLNIDDPAYQLNVVTMNGYSVTGHRGETVSAVTDNPLRRFNGGKKDEPEQSVPTDMLCLKPTLEKKFF
GKEFNDNIHIQLIYNILDIEKILAVYSTNAIYALNNMSADENIENSDFFMKRTTDETFDDFEKKKESTNSREKADFDAFEKFIG
NYRLAYFADAFYVNKKNPKGKAKNVLREDKELYSVLTLIGKLRHWCVHSEEGRAEFWLYKLNELKDDFKNVLDVVYNRPVEEIN
NRFIENNKVNIQILGSVYKNTDIAELVRSYYEFLITKKYKNMGFSIKKLRESMLEGKGYADKEYDSVRNKLYQMTDFILYTGYI
NEDSDRADDLVNTLRSSLKEDDKTTVYCKEADYLWKKYRESIREVADALDGDNIKRLSKSNIEIQEDKLRKCFISYADSVSEFT
KLIYLLTRFLSGKEINDLVTTLINKFDNIRSFLEIMDELGLDRTFTAEYSFFEGSTKYLAELVELNSFVKSCSFDINAKRTMYR
DALDILGIKSGKTEEDIEKMIDNILQIDANGDKKLKKNNGLRNFIASNVIDSNRFKYLVRYGNPKKIRETAKCKPAVRFVLNEI
PDAQIERYYEACCPKNTALCSANKRREKLADMIAEIKFENFSDAGNYQKANVTSKTHEAEIKRKNQAIIRLYLTVMYIMLKNLV
NVNARYVIAFHCVERDTKLYAESGLEVGNIEKNKTNLTMAVMGVKLENGIIKTEFDKSLAENAANRYLRNARWYKLILDNLKKS
ERAVVNEFRNTVCHLNAIRNININIDGIKEVENYFALYHYLIQKHLENRFADKKVERDTGDFISKLEEHKTYCKDFVKAYCTPF
GYNLVRYKNLTIDGLFDKNYPGKDDSDKQK (SEQ ID NO: 343)
>OGMO01000062_69
[metagenome]
MAKKNKMKPRELREAQKKARQLKAAEINNNAAPAIAAMPAAEVIAPAAEKKKSSVKAAGMKSILVSKNKMYITSFGKGNSAVLE
YEVDKVDNDNYNKTQLSSEDSSNIELCGVTKVNITFSSKHGLESGVEINTSNPTHRSGESSPVRWDMLGLKSELEKRFFGKTFD
DNIHIQLIYNILDIEKILAVYVTNIVYALNNMLGVKGSESYDDFMGYLSAQNTYYIFTHPDKSNLSDKVKGNIKKSLSKFNDLL
KTKRLGYFGLEEPKTKDTRVSQAYKKRVYHMLAIVGQIRQSVFHDKSSKLDEDLYSFINNIDPEYRETLDYLVDERFDSINKGF
IQGNKVNISLLIDMMKGYEADDIIRLYYDFIVLKSQKNLGFSIKKLREKMLDEYGYRFKDKQYDSVRSKMYKLMDFLLFCNYYR
NDVVAGEALVRKLRFSMTDDEKEGIYADEAAKLWGKFRNDFENIADHMNGDVIKELGKADMDFDEKILDSEKKNASDLLYFSKM
IYMLTYFLDGKEINDLLTTLISKFDNIKEFLKIMKSSAVDVECELTVGYKLFNDSQRITNELFIVKNIASMRKPAASAKLTMLR
DALTILGIDDKITDDRISEILKLKEKGKGIHGLRNFITNNVIESSRFVYLIKYANAQKIREVAENEKVVMFVLGGIPDTQIERY
YKSCVEFPDMNSSLEAKRSELARMIKNIRFDDFKNVKQQANGRENVAKERAKAVIGLYLTVMYLLVKNLVNVNARYVIAIHCLE
RDFGLYKEIIPELASKNLKNDYRILSQTLCELCDDRDESPNLFLKKNKRLRKCVEVDINNADSSMTRKYRNCIAHLTVVRELKE
YIGDIRTVDSYFSIYHYVMQRCITKREDDTKQEEKIKYEDDLLKNHGYTKDFVKALNSPFGYNIPRFKNLSIEQLFDRNEYLTE
K (SEQ ID NO: 344)
>OGMP01001167_15
[metagenome]
MAKKNKMKPRELREAQKKARQLKAAEINNNAAPAIAAMPAAEVIAPAAEKKKSSVKAAGMKSILVSENKMYITSFGKGNSAVLE
YEVDNNDYNKTQLSSKDNSNIELGNVNEVNITFSSRRGFESGVEINTSNPTHRSGESSSVRGDMLGLKSELEKRFFGKTFDDNI
HIQLIYNILDIEKILAVYVTNIVYALNNMLGEGDESNYDFMGYLSTFNTYKVFTNPNGSTLSDDKKENIRKSLSKFNVLLKTKR
LGYFGLEEPKTKDNRVSEAYKKRVYHMLAIVGQIRQCVFHDKSGAKRFDLYSFINNIDPEYRDTLDYLVEERLKSINKDFIQGN
KVNISLLIDMMKGYEADDIIRLYYDFIVLKSQKNLGFSIKKLREKMLEEYGFRFKDKQYDSVRSKMYKLMDFLLFCNYYRNDIA
AGEALVRKLRFSMTDDEKEGIYAGEAAKLWGKFRNDFENIADHMNGDVIKELGKADMDFDEKILDSEKKNASDLLYFSKMIYML
TYFLDGKEINDLLTTLISKFDNIKEFLKIMKSSAVDVECELTAGYKLFNDSQRITNELFIVKNIASMRKPAASAKLTMFRDALT
ILGIDDNITDDRISEILKLKEKGKGIHGLRNFITNNVIESSRFVYLIKYANAQKIREVAKNEKVVMFVLGGIPDTQIERYYKSC
VEVPDMNSSLEAKRSELARMIKNIRFDDFKNVKQQAKGRENVAKERAKAVIGLYLTVMYLLVKNLVNVNARYVIAIHCLERDFG
LYKEIIPELASKNLKNDYRILSQTLCELCDDRDKSPNLFLKKNKRLRKCVEVDINNADSNMTRKYRNCIAHLTVVRELKEYIGD
IRTVDSYFSIYHYVMQRRITKRKDDTKQEEKIKYEDDLLKNHGYTKDFVKALNSPFGYNIPRFKNLSIEQLFDRNEYLTEK
(SEQ ID NO: 345)
>OGUJO1000114_43
[metagenome]
MAKKKRITAKERKQNHRESLMKKADSNAEKEKAKKPVVENKPDTAISKDNTPKPNKEIKKSKAKLAGVKWVIKANDDVAYISSF
GKGNNSVLEKRIMGDVSSNVNKDSHMYVNPKYTKKNYEIKNGFSSGSSLVTYPNKPDKNSGMDALCLKPYFEKDFFGHIFTDNM
HIQAIYNIFDIEKILAKHITNIIYTVNSFDRNYNQSGNDTIGFDINYRVPYSEYGGGKDSNGEPKNQSKWKKRKNFIKFYNKSK
PHLGYYENIFYDHGEPISEEKFYNYLNILNFIRNNTFHYKDDDIELYSENYSEEFVFINCLNKFVKNKFKNVNKNFISNEKNNL
YIILNAYGKDTENVEVVKKYSKELYKLSVLKTNKNLGVNVKKLRESAIEYGYCPLPYDKEKEVAKLSSVKHKLYKTYDFVITHY
LNSNDKILLEIVEVLRLSKNDDEKENVYKKYAEKLFKADDVINPIKAISKLFAEKGNKLFKEKIIIKKEYIEDVSIDKNIYDFT
KVIFFMTCFLDGKEINDLLTNIISKLQVIEDHNNVIKFISHNKDAVYKDYSDKYAIFRNAGKIATELEAIKSIARMENKIENAP
QEPLLNDALLALGVSKTDLENTYNKYFDSKEKTDKQSQKVSTFLMNNVINNNRFKYVIKYINPADINGLAKNRYLVKFVLSKIP
EEQIDSYYKLFSNEEEPSCEEKIKLLTKKISKLNFQTLFENNKIPNVEKERKKAIITLYFTIVYILVKNLVNINGLYTLALYFV
ERDRYFYKKICGKALRRKVGDKYDYLLLPEIFSGSKYREETKNLKLPKEKDRDIMKKYLPNDKDREGYNDFFTAYRNNIVHLNI
IAKLSELTKNIDKDINSYFDIYHYCTQRVMFDYCKMNNNVVLAKMKDLAHIKSDCDEFSSKHTYPFSSAVLRFMNLPFAYNVPR
FKNLSYKKFFDKQWLNH (SEQ ID NO: 346)
>OGUJO1000114_45
[metagenome]
MAKKKRITAKERKQNHRESLMKKADSNAEKEKAKKPVVENKPDTAISKDNTPKPNKEIKKSKAKLAGVKWVIKANDDVAYISSF
GKGNNSVLEKRIMGDVSSNVNKDSHMYVNPKYTKKNYEIKNGFSSGSSLVTYPNKPDKNSGMDALCLKPYFEKDFFGHIFTDNM
HIQAIYNIFDIEKILAKHITNIIYTVNSFDRNYNQSGNDTIGFDINYRVPYSEYGGGKDSNGEPKNQSKWKKRKNFIKFYNKSK
PHLGYYENIFYDHGEPISEEKFYNYLNILNFIRNNTFHYKDDDIELYSENYSEEFVFINCLNKFVKNKFKNVNKNFISNEKNNL
YIILNAYGKDTENVEVVKKYSKELYKLSVLKTNKNLGVNVKKLRESAIEYGYCPLPYDKEKEVAKLSSVKHKLYKTYDFVITHY
LNSNDKILLEIVEVLRLSKNDDEKENVYKKYAEKLFKADDVINPIKAISKLFAEKGNKLFKEKIIIKKEYIEDVSIDKNIYDFT
KVIFFMTCFLDGKEINDLLTNIISKLQVIEDHNNVIKFISHNKDAVYKDYSDKYAIFRNAGKIATELEAIKSIARMENKIENAP
QEPLLNDALLALGVSKTDLENTYNKYFDSKEKTDKQSQKVSTFLMNNVINNNRFKYVIKYINPADINGLAKNRYLVKFVLSKIP
EEQIDSYYKLFSNEEEPSCEEKIKLLTKKISKLNFQTLFENNKIPNVEKERKKAIITLYFTIVYILVKNLVNINGLYTLALYFV
ERDRYFYKKICGKALRRKVGDKYDYLLLPEIFSGSKYREETKNLKLPKEKDRDIMKKYLPNDKDREGYNDFFTAYRNNIVHLNI
IAKLSELTKNIDKDINSYFDIYHYCTQRVMFDYCKMNNNVVLAKMKDLAHIKSDCDEFSSKHTYPFSSAVLRFMNLPFAYNVPR
FKNLSYKKFFDKQ (SEQ ID NO: 347)
>OJKY01000879_3
[metagenome]
MAKKITAKQKREEKERLNKQKWAKNDSVIIVPETKEEIKTGEIQDNNRKRSRQKSQAKAMGLKAVLSFDNKIAIASFVSSKNAK
SSHIERITDKEGTTISVNSKMFESSVNKRDINIEKRITIEEPQQDGTIKKEEKGVKSTTCNPYFKVGGKDYIGIKEIAEEHFFG
RAFPNENLRVQIAYNIFDVQKILGTFVNNIIYSFYNLSRDEVQSDNDVIGMLYSISDYDRQKETETFLQAKSLLKQTEAYYAYF
DDVFKKNKKPDKNKEGDNSKQYQENLRHNFNILRVLSFLRQICMHAEVHVSDDEGCARTQNYTDSLEALFNISKAFGKKMPELK
TLIDNIYSKGINAINDEFVKNGKNNLYILSKVYPNEKREVLLREYYNFVVCKEGSNIGISTRKLKETMIAQNMPSLKEENTYRN
KLYTVMNFILVRELKNCATIREQMIKELRANMDEEEGRDRIYSKYAKEIYLYVKDKLKLMLNVFKEEAEGIIIPGKEDPVKFSH
GKLDKKEIESFCLTTKNTEDITKVIYFLCKFLDGKEINELCCAMMNKLDGISDLIETAKQCGEDVEFVDQFKCLSKCATMSNQI
RIVKNISRMKKEMTIDNDTIFLDALELLGRKIEKYQKDKNGDYVKDEKGKKVYTKDYNNFQDMFFEGKNHRVRNFVSNNVIKSK
WFSYVVRYNKPAECQALMRNSKLVKFALDELPDSQIEKYYISVFGEKSSSSNEEMRRELLKKLCDFSVRGFLDEIVLLSEDEMK
QKDKFSEKEKKKSLIRLYLTIVYLITKSMVKINTRFSIACATYERDYILLCQSEKAERAWEKGATAFALTRKFLNHDKPTFEQY
YTREREISAMPQEKRKELRKENDQLLKKTHYSKHAYCYIVDNVNNLTGAVANDNGRGLPCLSEKNDNANLFVEMRNKIVHLNVV
HDMVKYINEIKNITSYYAFFCYVLQRMIIGNNSNEQNKFKAKYSKTLQEFGTYSKDLMWVLNLPFAYNLPRYKNLSNEQLFYDE
EERMEKIVGRKNDSR (SEQ ID NO: 348)
>OLJF01000187_58
[metagenome]
MAKKNKMKPRELREAQKKARQLKAAEINNNAAPAIAAMPAAEVIAPAAEKKKSSVKAAGMKSILVSENKMYITSFGKGNSAVLE
YEVDNNDYNKTQLSSKDNSNIELGDVNEVNITFSSKHGFGSGMKINTSNPTHRSGESSPVRWDMLGLKSELEKRFFGKTFDDNI
HIQLIYNILDIEKILAVYVTNIVYALNNMLGVKGSESHDDFIGYLSTNNIYDVFIDPDNSSLSDDKKANVRKSLSKFNVLLKTK
RLGYFGLEEPKTKDNRVSEAYKKRVYHMLAIVGQIRQCVFHDKSGAKRFDLYSFINNIDPEYRDTLDYLVEERLKSINKDFIQG
NKVNISLLIDMMKGYEADDIIRLYYDFIVLKSQKNLGFSIKKLREKMLEEYGFRFKDKQYDSVRSKMYKLMDFLLFCNYYRNDV
VAGEALVRKLRFSMTDDEKEGIYADEAAKLWGKFRNDFENIADHMNGDVIKELGKADMDFDEKILDSEKKNASDLLYFSKMIYM
LTYFLDGKEINDLLTTLISKFDNIKEFLKIMKSSAVDVECELTAGYKLFNDSQRITNELFIVKNIASMRKPAASAKLTMFRDAL
TILGIDDNITDDRISEILKLKEKGKGIHGLRNFITNNVIESSRFVYLIKYANAQKIREVAKNEKVVMFVLGGIPDTQIERYYKS
CVEFPDMNSSLEAKRSELARMIKNISFDDFKNVKQQAKGRENVAKERAKAVIGLYLTVMYLLVKNLVNVNARYVIAIHCLERDF
GLYKEIIPELASKNLKNDYRILSQTLCELCDDRDESPNLFLKKNKRLRKCVEVDINNADSSMTRKYRNCIAHLTVVRELKEYIG
DIRTVDSYFSIYHYVMQRCITKRENDTKQEEKIKYEDDLLKNHGYTKDFVKALNSPFGYNIPRFKNLSIEQLFDRNEYLTEK
(SEQ ID NO: 349)
>OMWO01000091_3
[uncultured Clostridiales bacterium]
MAKKKRMSAKERKQQQINLRIKKATEDSTKKVNTTVAVNNKPISKEIKKSKAKLAGVKWVIKANDDVAYISSFGKGNNSVLEKR
IIGDVSSDVNKDSHMYVNPKYTKKNYEIKNGFSSGSSLTTHPNKPDKNSGMDALCLKTYFEKEIFKDKFNDNMHIQAIYNIFDI
EKTLAKHITNIIYAVNSLDRSYIQSGNDTIGFGLNFNIPYAEYGGGKDSNGKPENKSAWEKRESFIKFYNNAKDRFGYFESVFY
QNGKQISEEKFYIYLNILNFVRNSTFHYNNTSSHLYKERYCKINPKNNLKTDFEFVSYLNEFVKNKFKNVNKNFISNEKNNLYI
ILNAYGEDIEDVEVVKKYSKELYKLSVLKTNKNLGVNVKKLRESAIEYGYCPLPYDKEKEVAKLSSIKHKLYKTYDFVITHYLN
SNDKLLLEIVEALRLSKNDDKKENVYKIYAEKIFKAEYVINPIKTISNLFAEKGDKLFNEKVSISEEYVEDIRIDKNIHNFTKV
IFFLTCFLDGKEINDLLTNIISKLQVIEDHNNVIKAIANNNDAVYKDYSDKYAVFKNSGKIATELEAIKSIARMENKINKAFKE
PLLKDAMLALGVSPNDLDEKYEKYFKTDVDADKDHQKVSTFLMNNVINNSRFKYVVKYINPADINRLAKNKHLVKFVLDQIPHK
QIDSYYNSVSTVEEPSYKGKIQLLTKKITGLNFYSLFENCKIPNVEKEKKKAVITLYFTIIYILVKNLVNINGLYTLALYFVER
DGFFYKKICEKKDKKKTNKDVDYLLLPEIFSGSKYREETKNLKLPKEKDREIMKKYLPNDEDRKEYNKFFKQYRNNIVHLNIIA
NLSKLTSTIDKEINSYFEIFHYCAQRVMFDYCKNNNKVVL (SEQ ID NO: 350)

TABLE 3
Representative Type VI-D Direct Repeat Nucleotide Sequences

| Cas13d Effector Protein Accession | |
|---|---|
| Number | Direct Repeat Nucleotide Sequence |
| WP_005358205.1 (SEQ ID NO: 1) | GAACTACACCCGTGCAAAAATGCAGGGGTCTAAAAC (SEQ ID NO: 32) |
| WP_005358205.1 (SEQ ID NO: 1) | GAATTACACCCGTGCAAAAATGCAGGGGTCTAAAAC (SEQ ID NO: 33) |
| WP_005358205.1 (SEQ ID NO: 1) | GAACTACACCCGTGCAAAATTGCAGGGGTCTAAAAC (SEQ ID NO: 34) |
| LARF01000048_8 (SEQ ID NO: 2) | CTACTACACTGGTGCGAATTTGCACTAGTCTAAAAC (SEQ ID NO: 62) |
| LARF01000048_8 (SEQ ID NO: 2) | CTACTACACTGGTGCAAATTTGCACTAGTCTAAAAC (SEQ ID NO: 72) |
| 33000102661Ga0129314_1001134_19 | GAACTACACCCGTGCAAAAATGCAGGGGTCTAAAAC (SEQ ID NO: 43) |
| (SEQ ID NO: 3) | |
| 33000062261Ga0099364_10024192_5 | GTGCAGTAGCCTTACAGATTCGTAGGGTTCTGAGAC (SEQ ID NO: 37) |
| (SEQ ID NO: 4) | |
| NZ_NFLV01000009_111 (SEQ ID NO: 5) | GAACTACACCCTGGCTGAAAGTCAGGGTCTAAAAC (SEQ ID NO: 53) |
| NFIR01000008_78 (SEQ ID NO: 6) | GAACTACACTCTGGCTGAAAGTCAGGGTCTAAAAC (SEQ ID NO: 52) |
| NFIR01000008_78 (SEQ ID NO: 6) | GAACTACACTCTGGCTGAAAGTCAGGGTCTA (SEQ ID NO: 351) |
| CDYU01023067_140 (SEQ ID NO: 7) | CAGCACTACACCCCCCTGAAACAGGAGGGGTCTAAAAC (SEQ ID NO: 56) |
| CDY501033339_14 (SEQ ID NO: 7) | TAGCACTACACCCCCCTGAAACATGAGGGGTCTAAAAC (SEQ ID NO: |
| | 359) |
| CDYU01023067_140 (SEQ ID NO: 7) | TAGCACTACACCCCCCTGAAACATGAGGGGTCTAAAAC (SEQ ID NO: |
| | 360) |
| CDYU01004315_2 (SEQ ID NO: 8) | CTACTACACTGGTGCAAATTTGCACTAGTCTAAAAC (SEQ ID NO: 54) |
| CDYU01004315_2 (SEQ ID NO: 8) | CTACTACACTAGTGCGAATTTGCACTAGTCTAAAAC (SEQ ID NO: 55) |
| CDYU01004315_2 (SEQ ID NO: 8) | CTACTACACTGGTGCGAATTTGCACTAGTCTAAAAC (SEQ ID NO: 62) |
| OLFT01003273_1 (SEQ ID NO: 8) | CTACTACACTGGTGCGAATTTGCACTAGTCTAAAAC (SEQ ID NO: 62) |
| CDZE01002059_22 (SEQ ID NO: 9) | CTACTACACTGGTGCGAATTTGCACTAGTCTAAAAC (SEQ ID NO: 62) |
| CDYX01024884_4 (SEQ ID NO: 9) | CTACTACACTGGTGCGAATTTGCACTAGTCTAAAACC (SEQ ID NO: 361) |
| CDTW01032418_55 (SEQ ID NO: 10) | CAGCACTACACCCCCCTGAAACATGAGGGGTCTAAAAC (SEQ ID NO: |
| | 358) |
| CDZD01043528_308 (SEQ ID NO: 10) | CAGCACTACACCCCCCTGAAACATGAGGGGTCTAAAAC (SEQ ID NO: |
| | 362) |
| CDZF01024873_75 (SEQ ID NO: 10) | CAGCACTACACCCCCCTGAAACATGAGGGGTCTAAAAC (SEQ ID NO: |
| | 363) |
| CDZF01043927_109 (SEQ ID NO: 10) | CAGCACTACACCCCCCTGAAACATGAGGGGTCTAAAAC (SEQ ID NO: |
| | 364) |
| CDZT01047721_3 (SEQ ID NO: 11) | CTACTATACTGGTGCGAATTTGCACTAGTCTAAAATG (SEQ ID NO: 368) |
| CDZU01022944_3 (SEQ ID NO: 11) | CTACTATACTGGTGCGAATTTGCACTAGTCTAAAATG (SEQ ID NO: 369) |
| CDZVO1031905_3 (SEQ ID NO: 11) | CTACTATACTGGTGCGAATTTGCACTAGTCTAAAATG (SEQ ID NO: 370) |
| OGPA01000243_2 (SEQ ID NO: 11) | CTACTATACTGGTGCGAATTTGCACTAGTCTAAAATG (SEQ ID NO: 410) |
| 33000072961Ga0104830_100502_31 | CTACTACACTGGTGCGAATTTGCACTAGTCTAAAAC (SEQ ID NO: 38) |
| (SEQ ID NO: 12) | |
| 33000072961Ga0104830_100502_31 | CTACTACACTAGTGCGAATTTGCACTAGTCTAAAAC (SEQ ID NO: 74) |
| (SEQ ID NO: 12) | |
| ODXP01000624_4 (SEQ ID NO: 12) | CTACTACACTAGTGCGAATTTGCACTAGTCTAAAACTA (SEQ ID NO: |
| | 547) |
| 33000072991Ga0104319_1000623_29 | CTACTACACTGGTGCGAATTTGCACTAGTCTAAAAC (SEQ ID NO: 62) |
| (SEQ ID NO: 13) | |
| ODKA01005851_3 (SEQ ID NO: 13) | CTACTACACTGGTGCGAATTTGCACTAGTCTAAAAC (SEQ ID NO: 62) |
| OGPQ01001037_3 (SEQ ID NO: 14) | CTACTACACTGGTGCAAATTTGCACTA (SEQ ID NO: 414) |
| 33000084961Ga0115078_100057_51 | CTACTACACTGGTGCAAATTTGCACTA (SEQ ID NO: 557) |
| (SEQ ID NO: 14) | |
| CDZKO1015063_14 (SEQ ID NO: 15) | TACTGGTGCGAATTTGCACTAA (SEQ ID NO: 365) |
| 33000015981EMG_10000232_1 | GGACAATAACCTGCGAATTTTGGCAGGTTCTATGAC (SEQ ID NO: 36) |
| (SEQ ID NO: 16) | |
| 33000015981EMG_10003641_1 | GAACTACACCCCTGCAGAAATGCTGGGGTCTGAAAC (SEQ ID NO: 35) |
| (SEQ ID NO: 17) | |
| 33000184941Ga0187911_10005861_19 | GAACTACAGCCCTGTGAAATAACGGGGTTCTAAAAC (SEQ ID NO: 46) |
| (SEQ ID NO: 18) | |
| 33000184941Ga0187911_10005861_19 | GAACTACAGCCCTGTGAAATAACAGGGTTCTAAAAC (SEQ ID NO: 47) |
| (SEQ ID NO: 18) | |
| 33000184941Ga0187911_10005861_19 | CATGTAAACCCCTAACAAATGGTAGGGGTTTGAAAC (SEQ ID NO: 562) |
| (SEQ ID NO: 18) | |
| 33000184951Ga0187908_10006038_18 | CATGTAAACCCCTAACAAATGGTAGGGGTTTGAAAC (SEQ ID NO: 565) |
| (SEQ ID NO: 18) | |
| 33000184751Ga0187907_10006632_17 | CATGTAAACCCCTAACAAATGATAGGGGGTTGAAAC (SEQ ID NO: 44) |
| (SEQ ID NO: 19) | |
| 33000184941Ga0187911_10005861_18 | GAACTACAGCCCTGTGAAATAACGGGGTTCTAAAAC (SEQ ID NO: 46) |
| (SEQ ID NO: 19) | |
| 33000184941Ga0187911_10005861_18 | GAACTACAGCCCTGTGAAATAACAGGGTTCTAAAAC (SEQ ID NO: 47) |
| (SEQ ID NO: 19) | |
| 33000184751Ga0187907_10006632_17 | CATGTAAACCCCTAACAAATGGTAGGGGTTTGAAAC (SEQ ID NO: 558) |
| (SEQ ID NO: 19) | |
| 33000184751Ga0187907_10006632_17 | CATGTAAACCCCTAACAAATGGTAGGGGTTTGAAAC (SEQ ID NO: 559) |
| (SEQ ID NO: 19) | |
| 33000184931Ga0187909_10005433_18 | CATGTAAACCCCTAACAAATGGTAGGGGTTTGAAAC (SEQ ID NO: 560) |
| (SEQ ID NO: 19) | |
| 33000184931Ga0187909_10005433_18 | CATGTAAACCCCTAACAAATGGTAGGGGTTTGAAAC (SEQ ID NO: 561) |
| (SEQ ID NO: 19) | |
| 33000184941Ga0187911_10005861_18 | CATGTAAACCCCTAACAAATGGTAGGGGTTTGAAAC (SEQ ID NO: 563) |
| (SEQ ID NO: 19) | |
| 33000184951Ga0187908_10006038_19 | CATGTAAACCCCTAACAAATGGTAGGGGTTTGAAAC (SEQ ID NO: 566) |
| (SEQ ID NO: 19) | |
| 33000188781Ga0187910_10006931_17 | CATGTAAACCCCTAACAAATGGTAGGGGTTTGAAAC (SEQ ID NO: 567) |
| (SEQ ID NO: 19) | |
| 33000188781Ga0187910_10006931_17 | CATGTAAACCCCTAACAAATGGTAGGGGTTTGAAAC (SEQ ID NO: 568) |
| (SEQ ID NO: 19) | |
| 33000184941Ga0187911_10069260_3 | GAACTACAGCCCTGTGAAATAACAGGG (SEQ ID NO: 564) |
| (SEQ ID NO: 20) | |
| 33000184931Ga0187909_10030832_9 | CTACTACTACCCTGTTATTTGACAGGGTTCAAAAAC (SEQ ID NO: 45) |
| (SEQ ID NO: 21) | |
| 33000184941Ga0187911_10019634_9 | CTACTACTACCCTGTTATTTGACAGGGTTCAAAAAC (SEQ ID NO: 45) |
| (SEQ ID NO: 21) | |
| 33000188781Ga0187910_10040531_1 | GTTTCTGAACCCTGCCATTTGGCAGGGTAGTAGTTG (SEQ ID NO: 569) |
| (SEQ ID NO: 21) | |
| 33000184931Ga 0187909_10024847_5 | GAACGACGTCACTACACACCGAGAGGTGTCTAAAAC (SEQ ID NO: 48) |
| (SEQ ID NO: 22) | |
| 33000184941Ga0187911_10037073_4 | GAACGACGTCACTACACACCGAGAGGTGTCTAAAAC (SEQ ID NO: 48) |
| (SEQ ID NO: 22) | |
| 33000184951Ga0187908_10013323_2 | GAACGACGTCACTACACACCGAGAGGTGTCTAAAAC (SEQ ID NO: 48) |
| (SEQ ID NO: 22) | |
| 33000188781Ga0187910_10015336_15 | GAACGACGTCACTACACACCGAGAGGTGTCTAAAAC (SEQ ID NO: 48) |
| (SEQ ID NO: 22) | |
| 33000188781Ga0187910_10015336_15 | CAACTACTACCCTGCCAAATGGCAGGGTTCAGAAAC (SEQ ID NO: 49) |
| (SEQ ID NO: 22) | |
| WP_074833651.1 (SEQ ID NO: 23) | CCCTTTGTACTATACCTGTTTTACACAGGTCTAAAAC (SEQ ID NO: 60) |
| WP_074833651.1 (SEQ ID NO: 23) | GTACTATACCTGTTTTACACAGGATAATAACCAAAAT (SEQ ID NO: 61) |
| WP_074833651.1 (SEQ ID NO: 23) | CTACTATACTAGTGTGATTTTACACTAGTCTAAAAC (SEQ ID NO: 352) |
| WP_041337480.1 (SEQ ID NO: 24) | CTACTACACTAGTGCGAATTTGCACTAGTCTAAAAC (SEQ ID NO: 63) |
| WP_041337480.1 (SEQ ID NO: 24) | TCTCTTGGCGGAAAGAAAACAGAAAGACGAAGAACAGGACAAATGGCTATC |
| | (SEQ ID NO: 353) |
| DBYI01000091_43 (SEQ ID NO: 25) | GAACTATACCCCTACCAAATGGTCGGGGTCTGAAAC (SEQ ID NO: 64) |
| WP_075424065.1 (SEQ ID NO: 26) | CAAGTAAACCCCTACCAACTGGTCGGGGTTTGAAAC (SEQ ID NO: 65) |
| WP_075424065.1 (SEQ ID NO: 26) | CAAGTAAACCCTTACCAACTGGTCGGGGTTTGAAAC (SEQ ID NO: 66) |
| WP_009985792.1 (SEQ ID NO: 27) | GAACTATAGTAGTGTAAATTTGCACTACTATAAAAC (SEQ ID NO: 67) |
| WP_009985792.1 (SEQ ID NO: 27) | GAACTATAGTAGTGTGAATTTACACTACTCTAAAAC (SEQ ID NO: 354) |
| CDC65743.1 (SEQ ID NO: 28) | CTACTACACTAGTGCGAATTTGCACTAGTCTAAAAC (SEQ ID NO: 68) |
| CDC65743.1 (SEQ ID NO: 28) | CTACTACACTAGTGCGAATTTGCGCTAGTCTAAAAC (SEQ ID NO: 69) |
| CDC65743.1 (SEQ ID NO: 28) | CTACTACACTAGTGCGAATTTGCACTAGTCTAAAAC (SEQ ID NO: 70) |
| CDC65743.1 (SEQ ID NO: 28) | CTACTACACTGGTGCAAATTTGCACTAGTCTAAAAC (SEQ ID NO: 71) |
| CDC65743.1 (SEQ ID NO: 28) | GTGCGAATTTGCGCTAGTCTAAAAC (SEQ ID NO: 356) |
| DJXD01000002_3 (SEQ ID NO: 29) | CAACTACAACCCCGTAAAAATACGGGGTTCTGAAAC (SEQ ID NO: 73) |
| DJXD01000002_3 (SEQ ID NO: 29) | CAACTACAACCCCGTAAAAATACGGGGTTCTGAAACC (SEQ ID NO: 357) |
| SCH71549.1 (SEQ ID NO: 30) | CTACTACACTAGTGCGAATTTGCACTAGTCTAAAAT (SEQ ID NO: 57) |
| SCH71549.1 (SEQ ID NO: 30) | CTACTACACTAGTGCGAATTTGCGCTAGTCTAAAAC (SEQ ID NO: 58) |
| SCH71549.1 (SEQ ID NO: 30) | CTACTACACTAGTGCGAATTTGCGCTAGTCTAAAAC (SEQ ID NO: 69) |
| SCH71549.1 (SEQ ID NO: 30) | GTGCGAATTTGCGCTAGTCTAAAA (SEQ ID NO: 367) |
| SCH71549.1 (SEQ ID NO: 30) | GTGCGAATTTGCGCTAGTCTAAAAC (SEQ ID NO: 409) |
| SCH71549.1 (SEQ ID NO: 30) | GTGCGAATTTGCGCTAGTCTAAAAC (SEQ ID NO: 415) |
| SCH71549.1 (SEQ ID NO: 30) | GTGCGAATTTGCGCTAGTCTAAAAC (SEQ ID NO: 488) |
| SCH71549.1 (SEQ ID NO: 30) | GTGCGAATTTGCGCTAGTCTAAAAC (SEQ ID NO: 514) |
| SCH71549.1 (SEQ ID NO: 30) | GTGCGAATTTGCGCTAGTCTAAAAC (SEQ ID NO: 526) |
| SCJ27598.1 (SEQ ID NO: 31) | CTACTACACTGGTGCAAATTAGCACTAGTCTAAAAC (SEQ ID NO: 76) |
| SCJ27598.1 (SEQ ID NO: 31) | CTACTACACTGGTGCAAATTAGCACTAGTCTAAAAC (SEQ ID NO: 77) |
| SCJ27598.1 (SEQ ID NO: 31) | CTACTACACTGGTGTGAATTTGCAC (SEQ ID NO: 487) |
| NZ_ACOK01000100_5 (SEQ ID NO: 200) | GAACTATAGTAGTGTAAATTTGCACTACTATAAAAC (SEQ ID NO: 67) |
| NZ_ACOK01000100_5 (SEQ ID NO: 200) | GAACTATAGTAGTGTGAATTTACACTACTCTAAAAC (SEQ ID NO: 355) |
| 33000062261Ga0099364_10024192_5 | GTGCAGTAGCCTTACAGATTCGTAGGGTTCTGAGAC (SEQ ID NO: 37) |
| (SEQ ID NO: 201) | |
| 33000073611Ga0104787_100954_14 | CTACTACACAGGTGCAATTTTGCACTAGTCTAAAAC (SEQ ID NO: 40) |
| (SEQ ID NO: 202) | |
| 33000073611Ga0104787_100954_14 | CTACTACACTGGTGCGAATTTGCACTAGTCTAAAAC (SEQ ID NO: 41) |
| (SEQ ID NO: 202) | |
| CDZKO1015063_14 (SEQ ID NO: 202) | TACTGGTGCGAATTTGCACTAA (SEQ ID NO: 366) |
| OIZB01000622_13 (SEQ ID NO: 202) | TACTGGTGCGAATTTGCACTAA (SEQ ID NO: 498) |
| OIZB01000622_13 (SEQ ID NO: 202) | TACTGGTGCGAATTTGCACTAA (SEQ ID NO: 499) |
| ODHZ01001211_7 (SEQ ID NO: 202) | TACTGGTGCGAATTTGCACTAA (SEQ ID NO: 537) |
| 33000073611Ga0104787_100954_14 | TACTGGTGCGAATTTGCACTAA (SEQ ID NO: 554) |
| (SEQ ID NO: 202) | |
| 33000073611Ga0104787_100954_14 | TACTGGTGCGAATTTGCACTAA (SEQ ID NO: 555) |
| (SEQ ID NO: 202) | |
| 33000082721Ga0111092_1001379_1 | TACTGGTGCGAATTTGCACTAA (SEQ ID NO: 556) |
| (SEQ ID NO: 202) | |
| CEAA01017658_2 (SEQ ID NO: 203) | CTACTACACTGGTGCGAATTTGCACTAGTCTAAAAC (SEQ ID NO: 62) |
| OCHE01000387_10 (SEQ ID NO: 203) | GGAGGTGATAAAAATGGGAAA (SEQ ID NO: 392) |
| OCTW011587266_5 (SEQ ID NO: 204) | CTTATACAACACCCATTTTCACAGTGGGT (SEQ ID NO: 371) |
| OCVV011003687_3 (SEQ ID NO: 205) | GTTTGAGAGTAGTGTAATTTTATAGGGTAGTAAAAC (SEQ ID NO: 372) |
| OCVV011003687_3 (SEQ ID NO: 206) | GTTTGAGAGTAGTGTAATTTTATAGGGTAGTAAAAC (SEQ ID NO: 373) |
| ODA1010069496_4 (SEQ ID NO: 207) | GAACTATAGTAGTGTTTTTTTACACT (SEQ ID NO: 374) |
| ODA1011611274_2 (SEQ ID NO: 208) | GTACTACACCCCTGCAGTTTTGCAGGGGTCTGAAAC (SEQ ID NO: 375) |
| OATA01000148_47 (SEQ ID NO: 209) | CTACTATACTGGTGCGATTTTGCACTAGTCTAAAAC (SEQ ID NO: 376) |
| OBAI01000753_39 (SEQ ID NO: 209) | CTACTATACTGGTGCGATTTTGCACTAGTCTAAAAC (SEQ ID NO: 379) |
| OBAQ01000162_41 (SEQ ID NO: 209) | CTACTATACTGGTGCGATTTTGCACTAGTCTAAAAC (SEQ ID NO: 380) |
| OCHUO1001749_1 (SEQ ID NO: 209) | CTACTATACTGGTGCGATTTTGCACTAGTCTAAAAC (SEQ ID NO: 393) |
| OCPV01000148_47 (SEQ ID NO: 209) | CTACTATACTGGTGCGATTTTGCACTAGTCTAAAAC (SEQ ID NO: 396) |
| OFMN01000509_2 (SEQ ID NO: 209) | CTACTATACTGGTGCGATTTTGCACTAGTCTAAAAC (SEQ ID NO: 397) |
| OFRY01000077_43 (SEQ ID NO: 209) | CTACTATACTGGTGCGATTTTGCACTAGTCTAAAAC (SEQ ID NO: 400) |
| OGRH01000378_2 (SEQ ID NO: 209) | CTACTATACTGGTGCGATTTTGCACTAGTCTAAAAC (SEQ ID NO: 427) |
| OGUL01000592_19 (SEQ ID NO: 209) | CTACTATACTGGTGCGATTTTGCACTAGTCTAAAAC (SEQ ID NO: 432) |
| OIGD01000177_59 (SEQ ID NO: 209) | CTACTATACTGGTGCGATTTTGCACTAGTCTAAAAC (SEQ ID NO: 492) |
| OIXV01006344_7 (SEQ ID NO: 209) | CTACTATACTGGTGCGATTTTGCACTAGTCTAAAAC (SEQ ID NO: 495) |
| PPYF01129432_15 (SEQ ID NO: 209) | CTACTATACTGGTGCGATTTTGCACTAGTCTAAAAC (SEQ ID NO: 531) |
| OAVJ01001264_7 (SEQ ID NO: 210) | CTACTACACTGGTGCAAATTTGCACTA (SEQ ID NO: 377) |
| OBAE01000973_3 (SEQ ID NO: 211) | GTGCGAATTTGCACTAGTCTAAAAC (SEQ ID NO: 378) |
| OBAR01000289_55 (SEQ ID NO: 212) | CTACTACACTAGTGCGAATTTGCACTAGTCTAAAAC (SEQ ID NO: 74) |
| OBA501000138_55 (SEQ ID NO: 212) | CTACTACACTAGTGCGAATTTGCACTAGTCTAAAAC (SEQ ID NO: 74) |
| OCHD01001741_1 (SEQ ID NO: 212) | CTACTACACTAGTGCGAATTTGCACTAGTCTAAAAC (SEQ ID NO: 74) |
| OCHK01000325_37 (SEQ ID NO: 212) | CTACTACACTAGTGCGAATTTGCACTAGTCTAAAAC (SEQ ID NO: 74) |
| OCH501000450_6 (SEQ ID NO: 212) | CTACTACACTAGTGCGAATTTGCACTAGTCTAAAAC (SEQ ID NO: 74) |
| OCQA01000142_55 (SEQ ID NO: 212) | CTACTACACTAGTGCGAATTTGCACTAGTCTAAAAC (SEQ ID NO: 74) |
| OBCV01000332_2 (SEQ ID NO: 213) | CTACTACACTGGTGCAAATTTGCACTAGTCTAAAAC (SEQ ID NO: 75) |
| OBDE01000870_1 (SEQ ID NO: 214) | CTACTACACTGGTGCGAATTTGCACTAG (SEQ ID NO: 381) |
| OBII01002626_5 (SEQ ID NO: 215) | CTACTACACTAGTGCGAATTTGCACTAGTCTAAAAC (SEQ ID NO: 74) |
| OBII01002626_3 (SEQ ID NO: 216) | CTACTACACTAGTGCGAATTTGCACTAGTCTAAAAC (SEQ ID NO: 74) |
| OBJF01000033_8 (SEQ ID NO: 217) | GATTGAAAGGATTGTAAATTTGCAAGGTCTTAAAAC (SEQ ID NO: 382) |
| OBJF01000033_8 (SEQ ID NO: 218) | GATTGAAAGGATTGTAAATTTGCAAGGTCTTAAAAC (SEQ ID NO: 383) |
| OJMK01000275_31 (SEQ ID NO: 218) | GATTGAAAGGATTGTAAATTTGCAAGGTCTTAAAAC (SEQ ID NO: 508) |
| OBKG01000025_26 (SEQ ID NO: 219) | CTACTACACTGGTGCGAATTTGCACTAGTCTAAAAC (SEQ ID NO: 62) |
| OBKR01000858_3 (SEQ ID NO: 220) | CTACTACACTGGTGCGATTTTGCACTAGTCTAAAACT (SEQ ID NO: 384) |
| OJM101000733_4 (SEQ ID NO: 220) | CTACTACACTGGTGCGATTTTGCACTAGTCTAAAACT (SEQ ID NO: 507) |
| OBVH01003037_1 (SEQ ID NO: 221) | GATTGAAAGGATTGTAAATTTACAAGGTCTTAAAAC (SEQ ID NO: 385) |
| OBVH01003037_2 (SEQ ID NO: 222) | GATTGAAAGGATTGTAAATTTACAAGGTCTTAAAAC (SEQ ID NO: 386) |
| OBVY01000267_8 (SEQ ID NO: 223) | CTACTACACTGGTGCGATTTTGCACTAGTCTAAAACT (SEQ ID NO: 387) |
| OG0001002653_3 (SEQ ID NO: 223) | CTACTACACTGGTGCGATTTTGCACTAGTCTAAAACT (SEQ ID NO: 403) |
| OBXZ01000094_20 (SEQ ID NO: 224) | GATTGAATGGATTGTAAATTT (SEQ ID NO: 388) |
| OBXZ01000094_20 (SEQ ID NO: 225) | GATTGAATGGATTGTAAATTT (SEQ ID NO: 389) |
| OCHB01002119_1 (SEQ ID NO: 226) | ACTGGTGCAAATTTGCACTAGTCTAAAAC (SEQ ID NO: 390) |
| OCHC01000012_250 (SEQ ID NO: 227) | TCTCTTGGCGGAAAGAAAACAGAAAGACGAAGAACAGGACAAATGGCTATC |
| | (SEQ ID NO: 391) |
| OCP501000464_4 (SEQ ID NO: 227) | GCTACTACACTGGTGCGAATTTGCACTAGTCTAAAAC (SEQ ID NO: 394) |
| OCHN01000290_35 (SEQ ID NO: 228) | GAACTACACCCGTGCAAAATTGCAGGGGTCTAAAAC (SEQ ID NO: 34) |
| OGP501000672_3 (SEQ ID NO: 229) | CTACTACACTAGTGCAAATTTGCACTAGTCTAAAAC (SEQ ID NO: 39) |
| OCPQ01000020_138 (SEQ ID NO: 229) | CTACTACACTGGTGCGAATTTGCACTAGTCTAAAAC (SEQ ID NO: 62) |
| OCPU01001206_17 (SEQ ID NO: 230) | GCTACTACACTGGTGCGAATTTGCACTAGTCTAAAAC (SEQ ID NO: 395) |
| OEHT01000244_15 (SEQ ID NO: 231) | CTACTACACTGGTGCGAATTTGCACTAGTCTAAAAC (SEQ ID NO: 62) |
| OGPU01000173_30 (SEQ ID NO: 231) | CTACTACACTGGTGCGAATTTGCACTAGTCTAAAAC (SEQ ID NO: 62) |
| OHHR01000227_3 (SEQ ID NO: 231) | CTACTACACTGGTGCGAATTTGCACTAGTCTAAAAC (SEQ ID NO: 62) |
| OJOL01000697_12 (SEQ ID NO: 231) | CTACTACACTGGTGCGAATTTGCACTAGTCTAAAAC (SEQ ID NO: 62) |
| OFMU01000310_31 (SEQ ID NO: 231) | CTACTACACTGGTGCGAATTTGCACTAG (SEQ ID NO: 398) |
| OGOI01001249_5 (SEQ ID NO: 231) | CTACTACACTGGTGCGAATTTGCACTAG (SEQ ID NO: 404) |
| OGQV01000794_21 (SEQ ID NO: 231) | CTACTACACTGGTGCGAATTTGCACTAGTCTAAAACT (SEQ ID NO: 419) |
| OGQZ01000194_33 (SEQ ID NO: 231) | CTACTACACTGGTGCGAATTTGCACTAGTCTAAAACT (SEQ ID NO: 422) |
| OHPC01000165_40 (SEQ ID NO: 231) | CTACTACACTGGTGCGAATTTGCACTAG (SEQ ID NO: 473) |
| OHUN01000170_40 (SEQ ID NO: 231) | CTACTACACTGGTGCGAATTTGCACTAG (SEQ ID NO: 486) |
| OJNT01000812_6 (SEQ ID NO: 231) | CTACTACACTGGTGCGAATTTGCACTAG (SEQ ID NO: 512) |
| OJOF01000269_30 (SEQ ID NO: 231) | CTACTACACTGGTGCGAATTTGCACTAG (SEQ ID NO: 513) |
| OKSV01000264_32 (SEQ ID NO: 231) | CTACTACACTGGTGCGAATTTGCACTAG (SEQ ID NO: 520) |
| OKVF01000105_32 (SEQ ID NO: 231) | CTACTACACTGGTGCGAATTTGCACTAG (SEQ ID NO: 525) |
| OEBA01002798_7 (SEQ ID NO: 231) | CTACTACACTGGTGCGAATTTGCACTAG (SEQ ID NO: 550) |
| OFMV01000268_25 (SEQ ID NO: 232) | GGAGGTGATAAAAATGGGAAA (SEQ ID NO: 399) |
| OGQU01002289_9 (SEQ ID NO: 232) | GGAGGTGATAAAAATGGGAAA (SEQ ID NO: 418) |
| OLGH01000826_1 (SEQ ID NO: 232) | GGAGGTGATAAAAATGGGAAA (SEQ ID NO: 527) |
| ODVS01001471_9 (SEQ ID NO: 232) | GGAGGTGATAAAAATGGGAAA (SEQ ID NO: 543) |
| OGCM01002738_3 (SEQ ID NO: 233) | CTACTATACTGGTGCGAATTTGCACTAGTCTAAAATG (SEQ ID NO: 401) |
| OGC001000353_15 (SEQ ID NO: 234) | ACTGGTGCAAATTTGCACTAGTCTAAAAC (SEQ ID NO: 402) |
| OGOK01000323_15 (SEQ ID NO: 235) | CTACTATACTGGTGCGATTTTGCACTAGTCTAAAAC (SEQ ID NO: 405) |
| OGOL01000786_27 (SEQ ID NO: 236) | GTGCGAATTTGCACTAGTCTAAAAC (SEQ ID NO: 406) |
| OGOO01001137_18 (SEQ ID NO: 237) | GAATTTGCACTAGTCTAAAAC (SEQ ID NO: 407) |
| OGOP01001824_10 (SEQ ID NO: 238) | GGAGGTGATAAAAATGGGAAAGACGATCCTTACGGCTATC (SEQ ID NO: |
| | 408) |
| OGRT01000617_3 (SEQ ID NO: 238) | GGAGGTGATAAAAATGGGAAAGACGATCCTTACGGCTATC (SEQ ID NO: |
| | 430) |
| OGPB01000314_7 (SEQ ID NO: 239) | CTACACTAGTGCGAATTTGCACTAGTCTAAAAC (SEQ ID NO: 411) |
| OGPJ01000449_26 (SEQ ID NO: 240) | CTGGTGCGAATTTGCACTAGTCTAAAAC (SEQ ID NO: 412) |
| OGPK01001709_2 (SEQ ID NO: 240) | CTGGTGCGAATTTGCACTAGTCTAAAAC (SEQ ID NO: 413) |
| OGP501000624_23 (SEQ ID NO: 241) | GAACTACACCCGTGCAAAATTGCAGGGGTCTAAAAC (SEQ ID NO: 34) |
| OGQH01000331_48 (SEQ ID NO: 242) | CCTACTACACTGGTGCGAATTTGCACTA (SEQ ID NO: 416) |
| OGQX01000605_8 (SEQ ID NO: 242) | TCTCTTGGCGGAAAGAAAACAGAAAGACGAAGAACAGGACAAATGGCTATC |
| | (SEQ ID NO: 421) |
| OGRG01000028_3 (SEQ ID NO: 242) | GCTACTACACTGGTGCGAATTTGCACTAGTCTAAAAC (SEQ ID NO: 426) |
| ODEE01001565_1 (SEQ ID NO: 242) | TCTCTTGGCGGAAAGAAAACAGAAAGACGAAGAACAGGACAAATGGCTATC |
| | (SEQ ID NO: 532) |
| ODIH01000145_73 (SEQ ID NO: 242) | GCTGAAAGAAAACAGAAAGACGAGGAGCAGGACAAATGGCTTTC (SEQ ID |
| | NO: 538) |
| OGQ001007270_2 (SEQ ID NO: 243) | CTACTACACTGGTGCGAATTTGCACTA (SEQ ID NO: 417) |
| OEFH01000394_40 (SEQ ID NO: 243) | CTACTACACTGGTGCGAATTTGCACTA (SEQ ID NO: 552) |
| OGQW01001429_6 (SEQ ID NO: 244) | CTACTACACTGGTGCGAATTTGCACTAG (SEQ ID NO: 420) |
| OGRA01000610_24 (SEQ ID NO: 245) | ACTGGTGCGATTTTGCACTAGTCTAAAAC (SEQ ID NO: 423) |
| OGRE01001635_6 (SEQ ID NO: 246) | GCTGAAAGAAAACAGAAAGACGAGGAGCAGGACAAATGGCTTTC (SEQID |
| | NO: 424) |
| OGRF01000967_2 (SEQ ID NO: 247) | GATTTTGCACTAGTCTAAAAC (SEQ ID NO: 425) |
| OGRN01001989_2 (SEQ ID NO: 248) | CTACTATACTGGTGCGATTTTGCACTAGTCTAAAAC (SEQ ID NO: 428) |
| OGRQ01003333_5 (SEQ ID NO: 249) | CTACTATACTGGTGCGATTTTGCACTAGTCTAAAAC (SEQ ID NO: 429) |
| OGRU01000829_2 (SEQ ID NO: 250) | CTACTACACTGGTGCGATTTTGCACTAGTCTAAAACT (SEQ ID NO: 431) |
| OGSD01001176_18 (SEQ ID NO: 251) | CTACTATACTGGTGCGAATTTGCACTAGTCTAAAAC (SEQ ID NO: 42) |
| OGWY01002732_3 (SEQ ID NO: 252) | GAACTACACCCGTGCAAAATTGCAGGGGTCTAAAAC (SEQ ID NO: 34) |
| OGXI01000433_6 (SEQ ID NO: 253) | GGAGGTGATAAAAATGGGAAA (SEQ ID NO: 433) |
| OGYU01002161_4 (SEQ ID NO: 253) | GGAGGTGATAAAAATGGGAAA (SEQ ID NO: 436) |
| OGG501001705_3 (SEQ ID NO: 253) | GGAGGTGATAAAAATGGGAAA (SEQ ID NO: 574) |
| OGXJ01002463_5 (SEQ ID NO: 254) | CTACTACACTGGTGCGAATTTG (SEQ ID NO: 434) |
| OGXL01002096_10 (SEQ ID NO: 255) | CTACTATACTGGTGCGAATTTGCACTAGTCTAAAAC (SEQ ID NO: 42) |
| OGYD01000683_23 (SEQ ID NO: 256) | GGAGGTGATAAAAATGGGAAA (SEQ ID NO: 435) |
| OGYL01002810_3 (SEQ ID NO: 257) | CTACTACACTGGTGCGAATTTGCACTAGTCTAAAAC (SEQ ID NO: 62) |
| OGYY01000371_37 (SEQ ID NO: 258) | TTTGCACTAGTCTAAAAC (SEQ ID NO: 437) |
| OHBM01000552_13 (SEQ ID NO: 258) | TTTTGCACTAGTCTAAAACTT (SEQ ID NO: 443) |
| OGGV01005531_2 (SEQ ID NO: 258) | TTTTGCACTAGTCTAAAACTT (SEQ ID NO: 575) |
| OGZC01000639_10 (SEQ ID NO: 259) | GTTTTAGTATCCACGATAAACGTGGATTGTAGT (SEQ ID NO: 438) |
| OHAI01000724_7 (SEQ ID NO: 260) | CTACTACACTGGTGCGAATTTGCACTAGTCTAAAAC (SEQ ID NO: 62) |
| OHAJ01000052_20 (SEQ ID NO: 261) | GATTGAAAGCTATGCGAATTTGCACAGTCTTAAAAC (SEQ ID NO: 439) |
| OGDS01000069_10 (SEQ ID NO: 261) | GATTGAAAGCTATGCGAATTTGCACAGTCTTAAAAC (SEQ ID NO: 572) |
| OHAN01001071_11 (SEQ ID NO: 262) | CTACTACACTAGTGCAAATTTGCGCTAGTCTAAAACT (SEQ ID NO: 440) |
| OHAR01000226_9 (SEQ ID NO: 263) | CTACTACACTAGTGCGAATTTGCACTA (SEQ ID NO: 441) |
| OHGN01001355_3 (SEQ ID NO: 263) | CTACTACACTAGTGCGAATTTGCACTA (SEQ ID NO: 454) |
| OHHD01000480_3 (SEQ ID NO: 263) | CTACTACACTAGTGCGAATTTGCACTA (SEQ ID NO: 456) |
| OHKC01000402_5 (SEQ ID NO: 263) | CTACTACACTAGTGCGAATTTGCACTA (SEQ ID NO: 460) |
| OHBL01000590_7 (SEQ ID NO: 264) | CTACTACACTGGTGCGATTTTGCACTAGTCTAAAA (SEQ ID NO: 442) |
| OHL001000586_3 (SEQ ID NO: 264) | CTACTACACTGGTGCGATTTTGCACTAGTCTAAAAC (SEQ ID NO: 463) |
| OHSZ01000559_4 (SEQ ID NO: 264) | CTACTACACTGGTGCGATTTTGCACTAGTCTAAAAC (SEQ ID NO: 482) |
| OHBP01000023_129 (SEQ ID NO: 265) | CTACTACACTAGTGCGAATTTGCACTAGTCTAAAAC (SEQ ID NO: 74) |
| OHDS01000019_133 (SEQ ID NO: 265) | CTACTACACTAGTGCGAATTTGCACTAGTCTAAAAC (SEQ ID NO: 74) |
| OHMH01000024_3 (SEQ ID NO: 265) | CTACTACACTAGTGCGAATTTGCACTAGTCTAAAAC (SEQ ID NO: 74) |
| OHBQ01000429_2 (SEQ ID NO: 266) | CTACTACACTGGTGCGAATTTGCACTAGTCTAAAAC (SEQ ID NO: 62) |
| OHEL01001488_6 (SEQ ID NO: 266) | CTACTACACTGGTGCGAATTTGCACTAGTCTAAAAC (SEQ ID NO: 62) |
| OHKH01000861_3 (SEQ ID NO: 266) | CTACTACACTGGTGCGAATTTGCACTAGTCTAAAAC (SEQ ID NO: 62) |
| OHBW01001448_1 (SEQ ID NO: 267) | ACTGGTGCGATTTTGCACTAGTCTAAAAC (SEQ ID NO: 444) |
| OHEG01001211_2 (SEQ ID NO: 267) | CTACTATACTGGTGCGATTTTGCACTAGTCTAAAAC (SEQ ID NO: 451) |
| OHSG01000119_6 (SEQ ID NO: 267) | CTACTATACTGGTGCGATTTTGCACTA (SEQ ID NO: 479) |
| OHSQ01001407_1 (SEQ ID NO: 267) | ACTGGTGCGATTTTGCACTAGTCTAAAAC (SEQ ID NO: 481) |
| OHJG01000198_33 (SEQ ID NO: 268) | CTACTATACTGGTGCGAATTTGCACTAGTCTAAAAT (SEQ ID NO: 59) |
| OHCE01000125_17 (SEQ ID NO: 268) | GCTGAAAGAAAACAGAAAGACGAGGAGCAGGACAAATGGCTTTC(SEQID |
| | NO: 445) |
| OHJJ01000127_35 (SEQ ID NO: 268) | GCTGAAAGAAAACAGAAAGACGAGGAGCAGGACAAATGGCTTTC(SEQID |
| | NO: 458) |
| OHRD01000126_17 (SEQ ID NO: 268) | TCTCTTGGCGGAAAGAAAACAGAAAGACGAAGAACAGGACAAATGGCTATC |
| | (SEQ ID NO: 477) |
| OHCH01000211_3 (SEQ ID NO: 269) | CTACTACACTAGTGCGAATTTGCACTAGTCTAAAAC (SEQ ID NO: 74) |
| OHPE01000834_1 (SEQ ID NO: 269) | CTACTACACTAGTGCGAATTTGCACTAGTCTAAAAC (SEQ ID NO: 74) |
| OHFX01001477_3 (SEQ ID NO: 269) | CTACACTGGTGCGAGTTTGCACTAGTCTAAAAC (SEQ ID NO: 453) |
| OHIJ01000315_7 (SEQ ID NO: 269) | CTACACTAGTGCGAATTTGCACTAGTCTAAAAC (SEQ ID NO: 457) |
| OHMQ01000465_4 (SEQ ID NO: 269) | CTACACTAGTGCGAATTTGCACTAGTCTAAAAC (SEQ ID NO: 467) |
| OHMW01000451_18 (SEQ ID NO: 269) | CTACACTGGTGCGAGTTTGCACTAGTCTAAAAC (SEQ ID NO: 468) |
| OHNF01001864_4 (SEQ ID NO: 269) | CTACACTGGTGCGAGTTTGCACTAGTCTAAAAC (SEQ ID NO: 469) |
| OHQE01002584_3 (SEQ ID NO: 269) | CTACACTGGTGCGAGTTTGCACTAGTCTAAAAC (SEQ ID NO: 476) |
| OKSK01000361_17 (SEQ ID NO: 269) | CTACACTGGTGCGAGTTTGCACTAGTCTAAAAC (SEQ ID NO: 519) |
| OKTU01000352_17 (SEQ ID NO: 269) | CTACACTGGTGCGAGTTTGCACTAGTCTAAAAC (SEQ ID NO: 523) |
| OHCP01000044_27 (SEQ ID NO: 270) | GTACTAAAGCCCGCTAGTATAGACGGGTTCTAAGAC (SEQ ID NO: 446) |
| OHSM01000196_10 (SEQ ID NO: 270) | GTACTAAAGCCCGCTAGTATAGACGGGTTCTAAGAC (SEQ ID NO: 480) |
| OKTR01000164_10 (SEQ ID NO: 270) | GTACTAAAGCCCGCTAGTATAGACGGGTTCTAAGAC (SEQ ID NO: 522) |
| OHCW01000317_3 (SEQ ID NO: 271) | GGTGCGATTTTGCACTAGTCTAAAAC (SEQ ID NO: 447) |
| OHDC01002972_3 (SEQ ID NO: 271) | GGTGCGATTTTGCACTAGTCTAAAAC (SEQ ID NO: 448) |
| OHKW01000215_41 (SEQ ID NO: 271) | GGAGGTGATAAAAATGGGAAA (SEQ ID NO: 461) |
| OHPP01000240_36 (SEQ ID NO: 271) | GGAGGTGATAAAAATGGGAAA (SEQ ID NO: 475) |
| OHRM01001189_3 (SEQ ID NO: 271) | GGTGCGATTTTGCACTAGTCTAAAAC (SEQ ID NO: 478) |
| OHTG01000221_40 (SEQ ID NO: 271) | GGAGGTGATAAAAATGGGAAA (SEQ ID NO: 483) |
| OHTH01000201_42 (SEQ ID NO: 271) | GGAGGTGATAAAAATGGGAAA (SEQ ID NO: 484) |
| OKTJ01001834_4 (SEQ ID NO: 271) | GGTGCGATTTTGCACTAGTCTAAAAC (SEQ ID NO: 521) |
| ODFV01004017_1 (SEQ ID NO: 271) | GGTGCGATTTTGCACTAGTCTAAAAC (SEQ ID NO: 533) |
| OHDP01000241_4 (SEQ ID NO: 272) | TGAACTACACCCGTGCAAAATTGCAGGGGTCTAAAAC (SEQ ID NO: 449) |
| OHFV01000201_5 (SEQ ID NO: 272) | TGAACTACACCCGTGCAAAATTGCAGGGGTCTAAAAC (SEQ ID NO: 452) |
| OHLY01001101_3 (SEQ ID NO: 272) | TGAACTACACCCGTGCAAAATTGCAGGGGTCTAAAAC (SEQ ID NO: 464) |
| OHPD01001131_4 (SEQ ID NO: 272) | TGAACTACACCCGTGCAAAATTGCAGGGGTCTAAAAC (SEQ ID NO: 474) |
| OHDT01000502_2 (SEQ ID NO: 273) | GCTGAAAGAAAACAGAAAGACGAGGAGCAGGACAAATGGCTTTC (SEQ ID |
| | NO: 450) |
| OHFA01000290_5 (SEQ ID NO: 274) | GAACTACACCCGTGCAAAATTGCAGGGGTCTAAAAC (SEQ ID NO: 34) |
| OHJZ01000157_5 (SEQ ID NO: 274) | GAACTACACCCGTGCAAAATTGCAGGGGTCTAAAAC (SEQ ID NO: 34) |
| OHST01000977_4 (SEQ ID NO: 274) | GAACTACACCCGTGCAAAATTGCAGGGGTCTAAAAC (SEQ ID NO: 34) |
| OKSP01001453_2 (SEQ ID NO: 274) | GAACTACACCCGTGCAAAATTGCAGGGGTCTAAAAC (SEQ ID NO: 34) |
| OHGX01000264_3 (SEQ ID NO: 275) | CTACTATACTGGTGCGAATTTGCACTAGTCTAAAATG (SEQ ID NO: 455) |
| OHME01000303_3 (SEQ ID NO: 275) | CTACTATACTGGTGCGAATTTGCACTAGTCTAAAATG (SEQ ID NO: 465) |
| OHNP01000278_34 (SEQ ID NO: 275) | CTACTATACTGGTGCGAATTTGCACTAGTCTAAAATG (SEQ ID NO: 470) |
| OH0101000307_2 (SEQ ID NO: 275) | CTACTATACTGGTGCGAATTTGCACTAGTCTAAAATG (SEQ ID NO: 471) |
| OHIB01002708_3 (SEQ ID NO: 276) | CTACTACACTGGTGCGAATTTGCACTAGTCTAAAAC (SEQ ID NO: 62) |
| OHJK01001285_9 (SEQ ID NO: 277) | GAACTACACCCGTGCAAAATTGCAGGGGTCTAAAAC (SEQ ID NO: 34) |
| OHS101000544_10 (SEQ ID NO: 277) | GAACTACACCCGTGCAAAATTGCAGGGGTCTAAAAC (SEQ ID NO: 34) |
| OKSN01001169_3 (SEQ ID NO: 277) | GAACTACACCCGTGCAAAATTGCAGGGGTCTAAAAC (SEQ ID NO: 34) |
| OHJ501001864_3 (SEQ ID NO: 278) | CTACTACACTGGTGCGATTTTGCACTAGTCTAAAAC (SEQ ID NO: 459) |
| OHLH01003112_3 (SEQ ID NO: 278) | CTACTACACTGGTGCGATTTTGCACTAGTCTAAAA (SEQ ID NO: 462) |
| OHJT01001977_4 (SEQ ID NO: 279) | GAACTACACCCGTGCAAAATTGCAGGGGTCTAAAAC (SEQ ID NO: 34) |
| OHPW01002065_2 (SEQ ID NO: 279) | GAACTACACCCGTGCAAAATTGCAGGGGTCTAAAAC (SEQ ID NO: 34) |
| OHMF01000395_24 (SEQ ID NO: 280) | CTACTACACTGGTGCGAATTTGCACTAGTCTAAAACT (SEQ ID NO: 466) |
| OHOK01001322_2 (SEQ ID NO: 280) | GTGCGAATTTGCACTAGTCTAAAAC (SEQ ID NO: 472) |
| OHUA01000395_26 (SEQ ID NO: 280) | GTGCGAATTTGCACTAGTCTAAAAC (SEQ ID NO: 485) |
| OHUY01000263_2 (SEQ ID NO: 281) | CTACTACACTAGTGCGAATTTGCACTAGTCTAAAAC (SEQ ID NO: 74) |
| OHVU01001109_1 (SEQ ID NO: 281) | CTACTACACTAGTGCGAATTTGCACTAGTCTAAAAC (SEQ ID NO: 74) |
| OHXZ01000057_25 (SEQ ID NO: 281) | CTACTACACTAGTGCGAATTTGCACTAGTCTAAAAC (SEQ ID NO: 74) |
| OHYU01000376_4 (SEQ ID NO: 281) | CTACTACACTAGTGCGAATTTGCACTAGTCTAAAAC (SEQ ID NO: 74) |
| OICI01000194_18 (SEQ ID NO: 281) | CTACTACACTAGTGCGAATTTGCACTAGTCTAAAAC (SEQ ID NO: 74) |
| OIDC01000397_3 (SEQ ID NO: 281) | CTACTACACTAGTGCGAATTTGCACTAGTCTAAAAC (SEQ ID NO: 74) |
| OIDU01000174_25 (SEQ ID NO: 281) | CTACTACACTAGTGCGAATTTGCACTAGTCTAAAAC (SEQ ID NO: 74) |
| OKUL01000400_17 (SEQ ID NO: 281) | CTACTACACTAGTGCGAATTTGCACTAGTCTAAAAC (SEQ ID NO: 74) |
| OKUR01000327_17 (SEQ ID NO: 281) | CTACTACACTAGTGCGAATTTGCACTAGTCTAAAAC (SEQ ID NO: 74) |
| OKVB01000375_17 (SEQ ID NO: 281) | CTACTACACTAGTGCGAATTTGCACTAGTCTAAAAC (SEQ ID NO: 74) |
| OKVC01000355_17 (SEQ ID NO: 281) | GGAGGTGATAAAAATGGGAAA (SEQ ID NO: 524) |
| OIBN01003740_1 (SEQ ID NO: 282) | CTACTACACTGGTGCAAATTAGCACTAGTCTAAAAC (SEQ ID NO: 77) |
| OIEE01000042_11 (SEQ ID NO: 283) | CTACTACACTGGTGCGATTTTGCACTAGTCTAAAACT (SEQ ID NO: 489) |
| OIEL01000292_3 (SEQ ID NO: 284) | CTACTATACTGGTGCGAATTTGCACTAGTCTAAAATG (SEQ ID NO: 490) |
| OJMG01000332_24 (SEQ ID NO: 284) | GCTGAAAGAAAACAGAAAGACGAGGAGCAGGACAAATGGCTTTC(SEQID |
| | NO: 506) |
| OIEN01002196_3 (SEQ ID NO: 285) | GCCCCTTGACCTTACGAAATGGTAAGGTTCCAAAAC (SEQ ID NO: 491) |
| OIXA01002812_3 (SEQ ID NO: 286) | CTACTACACTGGTGCGAATTTGCACTAGTCTAAAAC (SEQ ID NO: 62) |
| 01XU01000818_5 (SEQ ID NO: 287) | GATTGAAAGGATTGTAAATTT (SEQ ID NO: 493) |
| 01XU01000818_6 (SEQ ID NO: 288) | GATTGAAAGGATTGTAAATTT (SEQ ID NO: 494) |
| OIYU01000175_4 (SEQ ID NO: 289) | CTACTATACTGGTGCGAATTTGCACTAGTCTAAAATG (SEQ ID NO: 496) |
| OIZA01000315_9 (SEQ ID NO: 290) | GATTGAAAGGTTTGTAAATTTACAAGGTCTTAAAAC (SEQ ID NO: 497) |
| OIZ101000180_12 (SEQ ID NO: 291) | GATTGAAAGGATTGTAAATTTACAAGGTCTTAAAACA (SEQ ID NO: 500) |
| OIZ101000180_12 (SEQ ID NO: 292) | GATTGAAAGGATTGTAAATTTACAAGGTCTTAAAACA (SEQ ID NO: 501) |
| OIZU01000200_48 (SEQ ID NO: 293) | GAAAGAAAACAAAAAGACGAGAACAGGACAAATGGCTTTCTGAGCAGGCT |
| | (SEQ ID NO: 502) |
| OIZW01000344_20 (SEQ ID NO: 294) | GCTACTATACTGGTGCGAATTTGCACTAGTCTAAAAC (SEQ ID NO: 503) |
| OIZX01000427_25 (SEQ ID NO: 295) | ACTATAGCCCTGCCGGAAA (SEQ ID NO: 504) |
| OIZX01000427_26 (SEQ ID NO: 296) | ACTATAGCCCTGCCGGAAA (SEQ ID NO: 505) |
| OJMJ01002228_5 (SEQ ID NO: 297) | CTACTACACTAGTGCGAATTTGCACTAGTCTAAAAC (SEQ ID NO: 74) |
| OJMM01002900_7 (SEQ ID NO: 298) | GTACAATAGCCCTCTCGTAGTTGAGGGCTCTGAGAC (SEQ ID NO: 509) |
| OJMM01002900_7 (SEQ ID NO: 299) | GTACAATAGCCCTCTCGTAGTTGAGGGCTCTGAGAC (SEQ ID NO: 510) |
| OJMN01000417_22 (SEQ ID NO: 300) | CTACTATACTGGTGCGAATTTGCACTAGTCTAAAAC (SEQ ID NO: 42) |
| OJNI01000536_4 (SEQ ID NO: 300) | CTACTATACTGGTGCGAATTTGCACTAGTCTAAAAC (SEQ ID NO: 42) |
| OJNR01001167_9 (SEQ ID NO: 301) | GAACTACACCCGTGCAAAATTGCAGGGGTCTAAAAC (SEQ ID NO: 34) |
| OJOP01001093_3 (SEQ ID NO: 301) | GAACTACACCCGTGCAAAATTGCAGGGGTCTAAAAC (SEQ ID NO: 34) |
| OJNS01001527_9 (SEQ ID NO: 301) | GAACTACACCCGTGCAAAATTGCAGG (SEQ ID NO: 511) |
| OJPG01000139_73 (SEQ ID NO: 302) | CTACTACACTGGTGCGAATTTGCACTAGTCTAAAAC (SEQ ID NO: 62) |
| OJPS01000131_3 (SEQ ID NO: 302) | CTACTACACTGGTGCGAATTTGCACTAGTCTAAAAC (SEQ ID NO: 62) |
| OJQH01000635_3 (SEQ ID NO: 302) | CTACTACACTGGTGCGAATTTGCACTAGTCTAAAAC (SEQ ID NO: 62) |
| OJRP01000045_31 (SEQ ID NO: 302) | CTACTACACTGGTGCGAATTTGCACTAGTCTAAAAC (SEQ ID NO: 62) |
| OJPX01000614_4 (SEQ ID NO: 303) | GTGCGATTTTGCACTAGTCTAAAAC (SEQ ID NO: 515) |
| OJRG01001951_4 (SEQ ID NO: 303) | GTGCGATTTTGCACTAGTCTAAAAC (SEQ ID NO: 516) |
| OGNV01000836_4 (SEQ ID NO: 304) | CTACTACACTGGTGCGAATTTGCACTAGTCTAAAAC (SEQ ID NO: 62) |
| OKRZ01002949_5 (SEQ ID NO: 304) | CTACTACACTGGTGCGAATTTGCACTAGTCTAAAAC (SEQ ID NO: 62) |
| OKSB01002689_10 (SEQ ID NO: 305) | CTACTACACTAGTGCGAATTTGCACTAGTCTAAAAC (SEQ ID NO: 74) |
| OKSC01004083_2 (SEQ ID NO: 306) | GCACTACACCCCCCTGAAACATGAG (SEQ ID NO: 517) |
| OKSD01002505_11 (SEQ ID NO: 307) | CTACTACACTAGTGCGAATTTGCACTA (SEQ ID NO: 518) |
| OLGN01000304_32 (SEQ ID NO: 308) | GAAAGAAAACAAAAAGACGAGAACAGGACAAATGGCTTTCTGAGCAGGCT |
| | (SEQ ID NO: 528) |
| OLHE01000257_41 (SEQ ID NO: 309) | CTACTACACTGGTGCGAATTTGCACTAGTCTAAAAC (SEQ ID NO: 62) |
| PPYE01106492_34 (SEQ ID NO: 310) | GACGGGAGGTGATGAAAATG (SEQ ID NO: 529) |
| PPYE01385196_3 (SEQ ID NO: 311) | CTACTACACTGGTGCGAATTTGCACTAGTCTAAAAC (SEQ ID NO: 62) |
| PPYE01512733_3 (SEQ ID NO: 312) | CTACTATACTGGTGCGAATTTGCACTAGTCTAAAATG (SEQ ID NO: 530) |
| PPYF01670242_39 (SEQ ID NO: 313) | CTACTACACTGGTGCGAATTTGCACTAGTCTAAAAC (SEQ ID NO: 62) |
| ODFW01000112_43 (SEQ ID NO: 314) | GGAGGTGATAAAAATGGGAAA (SEQ ID NO: 534) |
| ODTU01003882_3 (SEQ ID NO: 314) | GGAGGTGATAAAAATGGGAAA (SEQ ID NO: 541) |
| ODGN01000188_50 (SEQ ID NO: 315) | CTACTACACTGGTGCGAATTTGCACTAGTCTAAAAC (SEQ ID NO: 62) |
| ODHH01000275_14 (SEQ ID NO: 316) | GCTGAAAGAAAACAGAAAGACGAGGAGCAGGACAAATGGCTTTC (SEQ ID |
| | NO: 535) |
| ODYJ01000298_33 (SEQ ID NO: 316) | GCTGAAAGAAAACAGAAAGACGAGGAGCAGGACAAATGGCTTTC (SEQ ID |
| | NO: 549) |
| ODHPO1001712_3 (SEQ ID NO: 317) | CTACTACACTGGTGCGAATTTGCACTAGTCTAAAAC (SEQ ID NO: 62) |
| ODHV01000466_16 (SEQ ID NO: 318) | CTAGTGCAAATTTGCACTAGTCTAAAACG (SEQ ID NO: 536) |
| ODXE01000717_15 (SEQ ID NO: 318) | CTAGTGCAAATTTGCACTAGTCTAAAACG (SEQ ID NO: 545) |
| ODJZ01000182_13 (SEQ ID NO: 319) | CTACTACACTGGTGCGAATTTGCACTA (SEQ ID NO: 539) |
| ODLN01002572_7 (SEQ ID NO: 320) | CTACTACACTGGTGCGAATTTGCACTAGTCTAAAAC (SEQ ID NO: 62) |
| ODQJ01000729_25 (SEQ ID NO: 321) | CTACTATACTGGTGCGATTTTGCACTAGTCTAAAAC (SEQ ID NO: 540) |
| ODUN01000242_23 (SEQ ID NO: 322) | CTACTATACTGGTGCGAATTTGCACTAGTCTAAAAC (SEQ ID NO: 42) |
| ODWX01000843_3 (SEQ ID NO: 322) | CTACTATACTGGTGCGAATTTGCACTAGTCTAAAAC (SEQ ID NO: 42) |
| ODVQ01003982_3 (SEQ ID NO: 323) | CCTACTACACTAGTGCGAATTTGCACTAGTCTAAAACT (SEQ ID NO: |
| | 542) |
| ODVR01002077_3 (SEQ ID NO: 324) | CTACTACACTGGTGCGAATTTGCACTAGTCTAAAAC (SEQ ID NO: 62) |
| ODXC01000747_3 (SEQ ID NO: 325) | CTACTACACTGGTGCGAATTTGCACTA (SEQ ID NO: 544) |
| OEEK01000163_43 (SEQ ID NO: 325) | TCTCTTGGCGGAAAGAAAACAGAAAGACGAAGAACAGGACAAATGGCTATC |
| | (SEQ ID NO: 551) |
| ODXO01005124_2 (SEQ ID NO: 326) | GTGCGAATTTGCACTAGTCTAAAAC (SEQ ID NO: 546) |
| OEFW01000634_7 (SEQ ID NO: 326) | GTGCGAATTTGCACTAGTCTAAAAC (SEQ ID NO: 553) |
| ODYC01000377_16 (SEQ ID NO: 327) | GGAGGTGATAAAAATGGGAAA (SEQ ID NO: 548) |
| OEJW01000623_11 (SEQ ID NO: 328) | CTACTACACTGGTGCGAATTTGCACTAGTCTAAAAC (SEQ ID NO: 62) |
| 33000193761Ga0187899_10021543_4 | TGAACGATAGCCTGCTGAAATATGCAGGTTCTAAGAC (SEQ ID NO: 570) |
| (SEQ ID NO: 329) | |
| OGCZ01001955_1 (SEQ ID NO: 330) | CTACTATACTGGTGCGAATTTGCACTAGTCTAAAATG (SEQ ID NO: 571) |
| OGDY01002059_17 (SEQ ID NO: 331) | GAACTACACCCGTGCAAAAATGCAGGGGTCTAAAAC (SEQ ID NO: 43) |
| OGEU01000713_24 (SEQ ID NO: 332) | CTACTACACTGGTGCGAATTTGCACTAGTCTAAAAC (SEQ ID NO: 62) |
| OGFM01002125_3 (SEQ ID NO: 333) | GACAGGAGGTGATAAAAATG (SEQ ID NO: 573) |
| OGHW01002048_1 (SEQ ID NO: 334) | CTACTACACTGGTGCAAATTTGCACTAGTCTAAAAC (SEQ ID NO: 75) |
| OGIE01002059_21 (SEQ ID NO: 335) | CTACTACACTAGTGCGAATTTGCACTAGTCTAAAACC (SEQ ID NO: 576) |
| OGII01000819_21 (SEQ ID NO: 335) | CTACTACACTAGTGCGAATTTGCACTAGTCTAAAACC (SEQ ID NO: 577) |
| OGJI01000038_151 (SEQ ID NO: 336) | CTACTACACTGGTGCGAATTTGCACTAGTCTAAAACTCA (SEQ ID NO: |
| | 578) |
| OGKE01000029_151 (SEQ ID NO: 336) | CTACTACACTGGTGCGAATTTGCACTAGTCTAAAACTCA (SEQ ID NO: |
| | 581) |
| OGKG01000020_152 (SEQ ID NO: 336) | CTACTACACTGGTGCGAATTTGCACTAGTCTAAAACTCA (SEQ ID NO: |
| | 582) |
| OGJK01007642_2 (SEQ ID NO: 337) | GTGCAAATTTGCACTAGTCTAAAAC (SEQ ID NO: 579) |
| OGJY01000516_18 (SEQ ID NO: 338) | CTACTACACTGGTGCGAATTTGCACTAGTCTAAAAC (SEQ ID NO: 62) |
| OGKA01000617_2 (SEQ ID NO: 339) | CTACTACACTGGTGCGAATTTGCACTAG (SEQ ID NO: 580) |
| OGKG01002483_14 (SEQ ID NO: 340) | GAACTACACCCGTGCAAAATTGCAGGGGTCTAAAAC (SEQ ID NO: 34) |
| OGKW01000585_4 (SEQ ID NO: 341) | ACTGGTGCGAATTTGCACTGGTCTAAAAC (SEQ ID NO: 583) |
| OGLJ01000192_54 (SEQ ID NO: 342) | CTACTACACTGGTGCAAATTTGCACTAGTCTAAAAC (SEQ ID NO: 75) |
| OGLM01001314_21 (SEQ ID NO: 343) | TGAACTACACCCGTGCAAAATTGCAGGGGTCTAAAAC (SEQ ID NO: 584) |
| OGMO01000062_69 (SEQ ID NO: 344) | CTACTACACTGGTGCAAATTTGCACTAGTCTAAAAC (SEQ ID NO: 75) |
| OGMP01001167_15 (SEQ ID NO: 345) | CTACTACACTAGTGCGAATTTGCACTAGTCTAAAAC (SEQ ID NO: 74) |
| OGUJ01000114_43 (SEQ ID NO: 346) | GATTGAAAGGATTGTAAATTTACAAGGTCTTAAAAC (SEQ ID NO: 585) |
| OGUJ01000114_45 (SEQ ID NO: 347) | GATTGAAAGGATTGTAAATTTACAAGGTCTTAAAAC (SEQ ID NO: 586) |
| OJKY01000879_3 (SEQ ID NO: 348) | GTACTAAAGCCCGCTAGTATAGACGGGTTCTAAGAC (SEQ ID NO: 587) |
| OLJF01000187_58 (SEQ ID NO: 349) | CTACTACACTGGTGCGATTTTGCACTAGTCTAAAACT (SEQ ID NO: 588) |
| OMWO01000091_3 (SEQ ID NO: 350) | GATTGAAAGCTATGCGAATTTGCACAGTCTTAAAAC (SEQ ID NO: 589) |

TABLE 4
Amino Acid Sequences of Cas13d Accessory Proteins WYLI

>SCH71532.1
[Ruminococcus sp. CAG:57]
MLIPPSTFLPKRDKNVPYIAEVQSIPLSPSAYSVIIKDKSIFETSLSPNGSVSMSSFLTSIFDSAYIASLKYKSDDNYKYIGIP
LLNAFVEWQIEEIDDSLDDKSKEIIKSYLISKLSAKYEKTKTENAVRVRLSICRDLYDTLSSDDLYYENKVYSLTLRRFLKAVY
EDYALLSDCERERLIFADNIIKINEVIKQNGSRYYSFIYAYSNMYSREKRRIRLIPYRIVSDEYKMYNYLVCLSDEKSAGKEFK
ADSYRISRLSGLSIAEKLSQKEYSSVTEYERLKEGHVKSVKHLLSDPRFGSDESDISKVYLTEKGVEMFGKILYQRPILKGNEK
PKPNTVNEFISPPIQVKYYFNKFGKDGVILSPSDSFEEMRTLYVEGAEAYNREVEM (SEQ ID NO: 78)
>SCJ27525.1
[human gut metagenome]
MLILPSTFLPKRDKNVPYIAEVQSIPLSPSAYSVIIKDKSIFETSLSPNGSVSMSSFLTSIFDSAYIASLKYKSEKYNGIPLLN
AFVKWQIEEINDGLDDKSKEIIKSYLISKLSAKYEKTKTENAVRVRLSICRDLYDTLSSDDLYYENKVYSSTLRRFLKAVYEDY
ALLSDCERERLIFADNIIKINEVIKQNGSRYYSFIYAYSNMYSREKRRIRLIPYRIVSDEYKMYNYLVCLSDEKSAGKEFKADS
YRISRLSGLSIAEKLSQKEYSSVTEYERLKEGHVKSVKHLLSDPRFGSDESDISKVYLTEKGVEMFGKILYQRPILKGNEKPKP
NAVNEFISPPIQVKYYFNKFGKDGVILSPSDSFEEMRTLYVEGAEAYNREVEM (SEQ ID NO: 79)
>WP_041337479.1
[Ruminococcus bicirculans]
MSMTPSTFLPKREDGVPYIAEVQSIPLSPSAYSVIIKDKSIFETSLSPNGSVSMSSFLTSIFDSAYIASLKYKSDDNYKYIGIP
LLNAFVKWQIEEIDDSLDDKSKEIIKSYLISKLSAKYEKTKTENAVRVRLSICRDLYDTLSSDDLYYENKVYSSTLRRFLKAVY
EDYALLSDCERERLIFADNIIKINEVIKQNGSRYYSFIYAYSNMYSREKRRIRLIPYRIVSDEYKMYNYLVCLSDEKSAGKEFK
ADSYRISRLSGLSIAEKLSQKEYSSVTEYERLKEGHVKSVKHLLSDPRFGSDESDISKVYLTEKGVEMFGKILYQRPILKGNEK
PKPNAVNEFISPPIQVKYYFNKFGKDGVILSPSDSFEEMRTLYVEGAEAYNREVEM (SEQ ID NO: 80)
>LARF01000048_7
[Ruminococcus sp. N15.MGS-57]
MLIPPSTFLPKRDKNVPYIAEVQSIPLSPSAYSVIIKDKSIFETSLSPNGSVSMSSFLTSIFDSAYIASLKYKSDDNYKYIGIP
LLNAFVKWQIEEIDDGLDDKSKEIIKSYLISKLSAKYEKTKTENAVRVRLSICRDLYDTLSSDDLYYENKVYSSTLRRFLKAVY
EDYALLSDCERERLIFADNIIKINEVIKQNGSRYYSFIYAYSNMYSREKRRIRLIPYRIVSDEYKMYNYLVCLSDEKSAGKEFK
ADSCRISRLSGLSIAEKLSQKEYSSVTEYERLKEVHVKSVKHLLSDPRFGSDESDISKVYLTEKGVEMFGKILYQRPILKGNEK
PKPNAVNEFISPPIQVKYYFNKFGKDGVILSPSDSFEEMRTLYVEGAEAYNREVEM (SEQ ID NO: 81)
>CDYU01004315_3
[gut metagenome]
MSMTPSTFLPKRDKNATYIAEVQSIPLSPSAYSVIIKDKSIFETSLSPNGSVSMSSFLTSIFDSAYIASLKYKSEKYNGIPLLN
AFVKWQIEEIDDGLDDKSKEIIKSYLISKLSAKYEKTKTENAVRVRLSICRDLYDTLSSDDLYYENKVYSSTLRRFLKAVYEDY
ALLSDCERERLIFADNIIKINEIIKQNGSRYYSFIYAYSNMYSREKRRIRLIPYRIVSDEYKMYNYLVCLSDEKSAGKEFKADS
YRISRLSGLSIAEKLSQKEYSSVTEYERLKEGHVKSVKHLLSDPRFGSDESDISKVYLTEKGVEMFGKILYQRPILKGNEKPKP
NTVNEFISPPIQVKYYFNKFGKDGVILSPSDSFEEMRTLYVEGAEAYNREVEM (SEQ ID NO: 82)
>CDYX01024884_5
[gut metagenome]
MFIPPSTFLPKREGGVPYIAEVQSIPLSPSAYSVIIKDKSIFETSLSPNGSVSMSSFLTSIFDSAYIASLKYKTDDNYKYIGIP
LLNAFIKWQIEEIDDGLDDKSKEIIKSYLISKFSAKYEKTKTENAVRVRLSICRDLYDTLSSDDLYYENKVYSSTLRRFLKAVY
EDYALLSDCERERLIFADNIIKINEVIKQNGNRYYSFIYAYSNMYSREKRRIRLIPYRIISDEYKMYNYLVCLSDEKSAGKEFK
ADSCRISRLSGLSIAEKLSQKEYSSVTEYERLKEGHVKSVKHLLSDPRFGSDESDISKVYLTEKGVEMFGKILYQRPILKGNEK
PKPNAVNEFISPPIQVKYYFNKFGKDGVILSPSDSFEEMRTLYVEGAEAYNREVEM (SEQ ID NO: 83)
>OGPQ01001037_4
[human gut metagenome]
MSMTPSTFLPKRDTNIPYIAEVQSIPLSPSAYAVIVKDKSIFETSLFPNGGSVSMSSFLTRIFDSAYIASLKYKSEEYNGIPLL
NAFVQWQIEEIDDSLDDKSKEIIKSYLISKLSAKYEKTKTENAVRVRLSICRDLYDTLSSDDLYYENKVYSSTLRRFLKAVYED
YALLSDCERERLIFADNIIKINEVIKQNGSRYYSFIYAYSNMYSREKRRIRLIPYRIVSDEYKMYNYLVCLSDEKSAGKEFKAD
SYRISRLSGLSIAEKLSQKEYSSVTEYERLKEGHVKSVKHLLSDPRFGSDESDISKVYLTEKGVEMFGKILYQRPILKGNEKPK
PNAVNEFISPPIQVKYYFNKFGKDGVILSPSDSFEEMRTLYVEGAEAYNREVEM (SEQ ID NO: 84)
>ODVQ01003982_4
[human metagenome]
MLIPPSTFLPKREGGVPYIAEVQSIPLSPSAYSVIIKDKSIFETSLFPNGSVSMSSFLTSIFDSAYIASLKYKSDDNYKYIGIP
LLNAFVKWQIEEIDDGLDDKSKEIIKSYLISKLSAKYKKTKTENAVRVRLSICRDLYDTLSSDDLYYENKVYSSTLRRFLKAVY
EDYALLSDCERERLIFADNIIKINEVIKQNGSRYYSFIYAYSNMYSREKRRIRLIPYRIVSDEYKMYNYLVCLSDEKSAGKEFK
ADSYRISRLSGLSIAEKLSQKEYSSVTEYERLKEVHVKSVKHLLSDPRFGSDESDISKVYLTEKGVEMFGKILYQRPILKGNEK
PKPNAVNEFISPPIQVKYYFNKFGKDGVILSPSDSFEEMRTLYVEGAEAYNREVEM (SEQ ID NO: 85)
>33000072991Ga0104319_1000623_28
[human-digestive system-homo sapiens]
MLIPPSTFLPKRKDGVPYIAEVQSIPLSPSAYAVIVKDKSIFETSLSPNSSVSMSSFLTRIFDSAYRASLKYKSEEYNGIPLLN
AFVQWQIEEIDGSLDDKSKEIIRSYLISKLSAKYKKTKTENAVRVRLSICRDLYDTLSRVDLCYENKVYGSTLRRFLKAVYEDY
ALLSDCERERLIFADNIIKINEVIKQNSNRYDNFIYAYSSMYSREKCRIRLIPYRIVSDEYKMYNYLVCLSDEKSVGKEFKADS
YRISRLSGLSIAEKLSQKEYSSVTEYERLKEGHVKSVKHLLSDPRFGSDESDISKVYLTEKGVEMFGKILYQRPILKGNEKPKP
NAVNEFISPPIQVKYYFNKFGKDGVILSPSDSFEEMRTLYVEGAEAYNREVEM (SEQ ID NO: 86)
>CDY501033339_20
[gut metagenome]
MGTENSSNEYQEARQHLSLSDAAWAVLQDDRQDFGGGRSWAGILNYVFAEYRDKADASISVAVERRRAQYEEKLVGVAAPAVRK
AVLEALLADYTEELIKKAAQNGATPPDKESFKFRLDRDNYAFREQWLDSPDAQYYGGRFSRYLRAVLEEYAAKTVYQREAIYFD
PQMRLIQASAANGELLRIRLKKGSEFEVRPYGVLGDRQETYHYLVGLSRPDGTREPEKASSFRLSNIVKLEVSFRRSGRLTEKE
RTDIESSIRGKGVQFLVQQRETIRIRLTEDGRQNYGRQLHLRPAARERAEVDDGLYRWEYTFYCTEFQAKAYFLKFCGDAKVVE
PQSLRETFAQEYRSGLRACGEEP (SEQ ID NO: 87)
>CDTW01032418_59
[gut metagenome]
MGTENSSNEYQEARQHLSLSDAAWAVLQDDRRDFGGGRSWAGILNYVFTMYRDKADASVSVAVSRRREQLEEQLGGVVSPAARD
AVLDRLMEVYAGELAEKAMSDGAVAQQKEVFKFRLDRDNYAFREQWLDSPDAARYYGNRFSRYLRAVLEEYAAKTVYQREAIYF
DPQMRLIRAAAANGELLRIRMKTGSSFEVRPYGVLGDRQETYHYLVGLSRPDGTRGPEKEFNFRLSKIIKLDVSFRRSGRLTEK
ERTDIESSIRGKGVQFLAQQRETIRIRLTEEGRRDYGSQMHLRPPAQTRTAVDDGAYRWEYTFFCTEFQARAYFLKFCGEAKVV
EPQSLRDTLAQEYRSGLRACGEEP (SEQ ID NO: 88)
>OATA01000148_62
[human gut metagenome]
MSMTPSTFLPKREGGVPYIAEVQSIPLSPSAYSVIIKDKSIFETSLSPNGSVSMSSFLTSIFDSAYIASLKYKSDDNYKYIGIP
LLNAFVEWQIKEINDGLDDKSKEIIKSYLISKLSAKYEKTKTENAVRVRLSICRDLYDTLSSDDLYYENKVYSSTLRRFLKAVY
EVYALLSDCERERLLFADNIIKINEVIKQNGSRYYSFIYAYSNMYSREKHRIRLIPYRIVSDEYKMYNYLVCLSDEKSAGKEFK
ADSYRISRLSGLSIAEKLSQKEYSSVTEYERLKEVHVKSVKHLLSDPRFGSDESDISKVYLTEKGVEMFGKILYQRPILKGNEK
PKPNAVNEFISPPIQVKYYFNKFGKDGVILSPSDSFEEMRTLYVEGAEAYNREVEM (SEQ ID NO: 590)
>OAVJ01001264_6
[human gut metagenome]
MSMTPSTFLPKREGGVPYIAEVQSIPLSPSAYSVIIKDKSIFETSLSPNGSVSMSSFLTSIFDSAYIASLKNKSDDNYKYNGIP
LLNAFVEWQIEEIDDGLDDKSKEIIKSYLISKLSAKYEKTKTENAVRVRLSICRDLYDTLSSDDLYYENKVYSSTLRRFLKAVY
EDYALLSDCERERLIFADNIIKINEVIKQNGSRYYSFIYAYSNMYSREKRRIRLIPYRIVSDEYKMYNYLVCLSDEKSAGKEFK
ADSYRISRLSGLSIAEKLSQKEYSSVTEYERLKEGHVKSVKHLLSDPRFGSDESDISKVYLTEKGVEMFGKILYQRPILKGNEK
PKPNAVNEFISPPIQVKYYFNKFGKDGVILSPSDSFEEMRTLYVEGAEAYNREVEM (SEQ ID NO: 591)
>OBAE01000973_4
[human gut metagenome]
MSMTPSTFLPKRDKNVPYIAEVQSIPLSPSAYSVIIKDKSIFETSLSPNGSVSMSSFLTSIFDSAYIASLKYKSDDNYKYIGIP
LLNAFVKWQIEEIDDSLDDKSKEIIKSYLISKLSAKYEKTKTENAVRVRLSICRDLYDTLSSDDLYYENKVYSSTLRRFLKAVY
EDYALLSDCERERLIFADNIIKINEVIKQNGSRYYSFIYAYSNMYSREKRRIRLIPYRIVSDEYKMYNYLVCLSDEKSAGKEFK
ADSYRISRLSGLSIAEKLSQKEYSSVTEYERLKEGHVKSVKHLLSDPRFGSDESDISKVYLTEKGVEMFGKILYQRPILKGNEK
PKPNAVNEFISPPIQVKYYFNKFGKDGVILSPSDSFEEMRTLYVEGAEAYNREVEM (SEQ ID NO: 592)
>OBAQ01000162_28
[human gut metagenome]
MSMTPSTFLPKREDGVPYIAEVQSIPLSPSAYSVIIRDKSIFETSLSPNGSVSMSSFLTSIFDSAYIASLKYKSDDNYKYIGIP
LLNAFVEWQIKEINDGLDDKSKEIIKSYLISKLSAKYEKTKTENAVRVRLSICRDLYDTLSSDDLYYENKVYSSTLRRFLKAVY
EVYALLSDCERERLLFADNIIKINEVIKQNGSRYYSFIYAYSNMYSREKHRIRLIPYRIVSDEYKMYNYLVCLSDEKSAGKEFK
ADSYRISRLSGLSIAEKLSQKEYSSVTEYERLKEVHVKSVKHLLSDPRFGSDESDISKVYLTEKGVEMFGKILYQRPILKGNEK
PKPNAVNEFISPPIQVKYYFNKFGKDGVILSPSDSFEEMRTLYVEGAEAYNREVEM (SEQ ID NO: 593)
>OBA501000138_57
[human gut metagenome]
MSMTPSTFLPKREGSVPYIAEVQSIPLSPSAYSVIIKDKSIFETSLSPNGSVSMSSFLTSIFDSAYIASLKYKSDDNYKYIGIP
LLNAFVKWQIEEIDDGLDDKSKEIIKSYLISKLSAKYEKTKTENAVRVRLSICRDLYDTLSSDDLYYENKVYSSTLRRFLKAVY
EDYALLSDCERERLLFADNIIKINEVIKQNGSRYYSFIYAYSNMHSREKRRIRLIPYRIVSDEYKMYNYLVCLSDEKGAGKEFK
ADSCRISRLSGLSIAEKLSQKEYSSVTEYERLKEGHVKSVKHLLSDPRFGSDESDISKVYLTEKGVEMFGKILYQRPILKGNEK
PKPNAVNEFISPPIQVKYYFNKFGKDGVILSPSDSFEEMRTLYVEGAEAYNREVEM (SEQ ID NO: 594)
>OBCV01000332_3
[human gut metagenome]
MSMTPSTFLPKREDGVPYIAEVQSIPLSPTAYSVIVRDKSIFETSLSPNGGSVSMSSFLTRIFDSAYRASLKYKSEEYNGIPLL
NAFVQWQIEEIDGSLDDKSKEIIKSYLISKLSAKYKKTKTENAVRVRLSICRDLYDTLSRDDLCYENKVYGSTLRRFLKAVYED
YALLSDCERERLIFADNIIKINEVIKQNSNRYDNFIYAYSNMYSREKRRIRLIPYRIVSDEYKMYNYLICLSDEKSADKEFKAD
SYRISRLSGLSIAEKLSQKEYSSVTEYERLKEDHVKSVKHLLNDPRFGSDESDISKVYLTEKGVEMFGKILYQRPILKGNEKPK
PNAVNEFISPPIQVKYYFNKFGKDGVILSPSDSFEEMRTLYVEGAEAYNRVVEM (SEQ ID NO: 595)
>OBKG01000025_25
[human gut metagenome]
MLIPPSTFLPKRDKNVPYIAEVQSIPLSPSAYSVIIKDKSIFETSLSPNGSVSMSSFLTSIFDSAYIASLKYKSDDNYKYIGIP
LLNAFVKWQIEEIDDGLDDKSKEIIKSYLISKLSAKYEKTKTENAVRVRLSICRDLYDTLSSDDLYYENKVYSSTLRRFLKAVY
EDYALLSDCERERLIFADNIIKINEVIKQNGSRYYSFIYAYSNMYSREKRRIRLIPYRIVSDEYKMYNYLVCLSDEKSAGKEFK
ADSCRISRLSGLSIAEKLSQKEYSSVTEYERLKEVHVKSVKHLLSDPRFGSDESDISKVYLTEKGVEMFGKILYQRPILKGNEK
PKPNAVNEFISPPIQVKYYFNKFGKDGVILSPSDSFEEMRTLYVEGAEAYNREVEK (SEQ ID NO: 596)
>OBKR01000858_4
[human gut metagenome]
MSMTPSTFLPKREGGVPYIAEVQSIPLSPSAYSVIIKDKSIFETSLSPNGSVSMSSFLTSIFDSSYIASLKYKSDDNYKYIGIP
LLNAFVKWQIEEIEDGLDDKSKEIIKSYLISKLSAKYEKTKTENAVRVRLSICRDLYDTLSSDDLYYENKVYSSTLRRFLKAVY
EDYALLSDCERERLLFADNIIKINEVIKQNGSRYYSFIYAYSNMYSREKRRIRLIPYRIVSDEYKMYNYLVCLSDEKSAGKEFK
ADSYRISRLSGLSIAEKLSQKEYFSVTEYERLKEGHVKSVKHLLSDPRFGSDESDISKVYLTEKGVEMFGKILYQRPILKGNEK
PKPNAVNEFISPPIQVKYYFNKFGKDGVILSPSDSFEEMRTLYVEGAEAYNREVEM (SEQ ID NO: 597)
>OBVY01000267_8
[human gut metagenome]
MSMTPSTFLPKREGGVPYIAEVQSIPLSPSAYSVIIKDKSIFETSLSPNGSVSMSSFLTSIFDSAYIASLKYKSGDNYKYIGIP
LLNAFVKWQIEEIDDGLDDKSKKIIKSYLISKLSAKYEKTKTENAVRVRLSICRDLYDTLSSDDLYYENKVYSLTLRRFLKAVY
EDYALLSDCERERLIFADNIIKINEVIKQNGSRYYSFIYAYSNMYSREKRRIRLIPYRIVSDEYKMYNYLVCLSDEKSAGKEFK
ADSYRISRLSGLSIAEKLSQKEYSSVTEYERLKEGHVKSVKHLLSDPRFGSDESDISKVYLTEKGVEMFGKILYQRPILKGNEK
PKPNAVNEFISPPIQVKYYFNKFGKDGVILSPSDSFEEMRTLYVEGAEAYNREVEM (SEQ ID NO: 598)
>OCHC01000012_251
[human gut metagenome]
MSMTPSTFLPKREDGVPYIAEVQSIPLSPSAYSVIIKDKSIFETSLSPNGSVSMSSFLTSIFDSAYIASLKYKSEKYNGIPLLN
AFVKWQIEEIDDSLDDKSKEIIKSYLISKLSAKYEKTKTENAVRVRLSICRDLYDTLSSDDLYYENKVYSSTLRRFLKAVYEDY
ALLSDCERERLIFADNIIKINEVIKQNGSRYYSFIYAYSNMYSREKRRIRLIPYRIVSDEYKMYNYLVCLSDEKSAGKEFKADS
YRISRLSGLSIAEKLSQKEYSSVTEYERLKEGHVKSVKHLLSDPRFGSDESDISKVYLTEKGVEMFGKILYQRPILKGNEKPKP
NAVNEFISPPIQVKYYFNKFGKDGVILSPSDSFEEMRTLYVEGAEAYNREVEM (SEQ ID NO: 599)
>OCHE01000387_8
[human gut metagenome]
MLIPPSTFLPKREDGVPYIAEVQSIPLSPSAYSVIIKDKSIFETSLSPNGSVSMSSFLTSIFDSAYIASLKYKSDDNYKYIGIP
LLNAFVEWQIEEIDDGLDDKSKEIIKSYLISKLSAKYEKTKTENAVRVRLSICRDLYDTLSSDDLYYENKVYSSTLRRFLKAVY
EDYALLSDCERERLLFADNIIKINEVIKQNGSRYYSFIYAYSNMYSREKRRIRLIPYRIVSDEYKMYNYLVCLSDEKSAGKEFK
ADSYRISRLSGLSIAEKLSQKEYSSVTEYERLKEVHVKSVKHLLSDPRFGSDESDISKVYLTEKGVEMFGKILYQRPILKGNEK
PKPNAVNEFISPPIQVKYYFNKFGKDGVILSPSDSFEEMRTLYVEGAEAYNREVEI (SEQ ID NO: 600)
>OCPQ01000020_137
[human gut metagenome]
MSMTPSTFLPKRDTNIPYIAEVQSIPLSPSAYAVIVKDKSIFETSLFPNGGSVSMSSFLTRIFDSAYIASLKYKSEEYNGIPLL
NAFVQWQIEEIDDSLDDKSKEIIKSYLISKLSAKYEKTKTENAVRVRLSICRDLYDTLSSDDLYYENKVYSSTLRRFLKAVYED
YALLSDCERERLIFADNIIKINEVIKQNGSRYYSFIYAYSNMYSREKRRIRLIPYRIVSDEYKMYNYLVCLSDEKSAGKEFKAD
SYRISRLSGLSIAEKLSQKEYSSVTEYERLKEVHVKSVKHLLSDPRFGSDESDISKVYLTEKGVEMFGKILYQRPILKGNEKPK
PNTVNEFISPPIQVKYYFNKFGKDGVILSPSDSFEEMRTLYVEGAEAYNREVEK (SEQ ID NO: 601)
>OFMU01000310_30
[human gut metagenome]
MSMTPSTFLPKREGGVPYIAEVQSIPLSPSAYSVIIKDKSIFETSLSPNGSVSMSSFLTSIFDSAYIASLKYKSDDNYKYIGIP
LLNAFVEWQIKEINDGLDDKSKEIIKSYLISKLSAKYEKTKTENAVRVRLSICRDLYDTLSSDDLYYENKVYSSTLRRFLKAVY
EDYALLSDCERERLIFADNIIKINEVIKQNGSRYYSFIYAYSNMYSREKRRIRLIPYRIVSDEYKMYNYLVCLSDEKSAGKEFK
ADSYRISRLSGLSIAEKLSQKEYSSVTEYERLKEGHVKSVKHLLSDPRFGSDESDISKVYLTEKGVEMFGKILYQRPILKGNEK
PKPNAVNEFISPPIQVKYYFNKFGKDGVILSPSDSFEEMRTLYVEGAEAYNREVEI (SEQ ID NO: 602)
>OFMV01000268_23
[human gut metagenome]
MLIPPSTFLPKREDGVPYIAEVQSIPLSPSAYSVIIKDKSIFETSLSPNGSVSMSSFLTSIFDSAYIASLKYKSDDNYKYNGIP
LLNAFVEWQIEEIDDGLDDKSKEIIKSYLISKLSAKYEKTKTENAVRVRLSICRDLYDTLSSDDLYYENKVYSSTLRRFLKAVY
EDYALLSDCERERLIFADNIIKINEVIKQNGSRYYSFIYAYSNMYSREKRRIRLIPYRIVSDEYKMYNYLVCLSDEKSAGKEFK
ADSYRISRLSGLSIAEKLSQKEYSSVTEYERLKEGHVKSVKHLLSDPRFGSDESDISKVYLTEKGVEMFGKILYQRPILKGNEK
PKPNAVNEFISPPIQVKYYFNKFGKDGVILSPSDSFEEMRTLYVEGAEAYNREVEI (SEQ ID NO: 603)
>OGC001000353_16
[human gut metagenome]
MSMTPSTFLPKREDGVPYIAEVQSIPLSPTAYSVIVRDKSIFETSLSPNGGSVSMSSFLTRIFDSAYRASLKYKSEEYNGIPLL
NAFVQWQIEEIDGSLDDKSKEIIKSYLISKLSAKYKKTKTENAVRVRLSICRDLYDTLSRDDLCYENKVYGSTLRRFLKAVYED
YALLSDCERERLIFADNIIKINEVIKQNSNRYDNFIYAYSNMYSREKRRIRLIPYRIVSDEYKMYNYLICLSDEKSADKEFKAD
SYRISRLSGLSIAEKLSQKEYSSVTEYERLKEDHVKSVKHLLNDPRFGSDESDISKVYLTEKGVEMFGKILYQRPILKGNEKPK
PNAVNEFISPPIQVKYYFNKFGKDGVILSPSDSFEEMRTLYVEGAEAYNRVVEI (SEQ ID NO: 604)
>OGOP01001824_8
[human gut metagenome]
MSMTPSTFLPKREDGVPYIAEVQSIPLSPSAYSVIIRDKSIFETSLSPNGSVSMSSFLTSIFDSAYIASLKYKSDDNYKYIGIP
LLNAFVEWQIKEINDGLDDKSKEIIKSYLISKLSAKYEKTKTENAVRVRLSICRDLYDTLSSDDLYYENKVYSSTLRRFLKAVY
EVYALLSDCERERLLFADNIIKINEVIKQNGSRYYSFIYAYSNMYSREKHRIRLIPYRIVSDEYKMYNYLVCLSDEKSAGKEFK
ADSYRISRLSGLSIAEKLSQKEYSSVTEYERLKEVHVKSVKHLLSDPRFGSDESDISKVYLTEKGVEMFGKILYQRPILKGNEK
PKPNAVNEFISPPIQVKYYFNKFGKDGVILSPSDSFEEMRTLYVEGAEAYNREVEI (SEQ ID NO: 605)
>OGPB01000314_5
[human gut metagenome]
MSMTPSTFLPKRDKNATYIAEVQSIPLSPSTYSVIIKDKSIFETSLSPNGSVSMSSFLTSIFDSAYIASLKYKSDDNYKYIGIP
LLNAFVEWQIEEIDDGLDDKSKEIIKSYLISKLSAKYKKTKTENAVRVRLSICRGLYDTLSSDDLYYENKVYSSTLRRFLKAVY
EDYALLSDCERERLIFADNIIKINEVIKQNGSRYYSFIYAYSNMYSREKRRIRLIPYRIVSDEYKMYNYLVCLSDEKSAGKEFK
ADSYRISRLSGLSIAEKLSQKEYSSVTEYERLKEVHVKSVKHLLSDPRFGSDESDISKVYLTEKGVEMFGKILYQRPILKGNEK
PKPNAVNEFISPPIQVKYYFNKFGKDGVILSPSDSFKEMRTLYVEGAEAYNREVEM (SEQ ID NO: 606)
>OGPJ01000449_25
[human gut metagenome]
MLIPPSTFLPKREGGVPYIAEVQSIPLSPSAYSVIIKDKSIFETSLSPNGSVSMSSFLTSIFDSAYIASLKYKSDDNYKYIGIP
LLNAFVEWQIEEIDDGLDDKSKEIIKSYLISKLSAKYEKTKTENAVRVRLSICRDLYDTLSSDDLYYENKVYSSTLRKFLKAVY
EDYALLSDCERERLLFADNIIKINEVIKQNGSRYYSFIYAYSNMYSREKRRIRLIPYRIVSDEYKMYNYLVCLSDEKSAGKEFK
ADSYRISRLSGLSIAEKLSQKEYSSVTEYERLKDGHVKSVKHLLSDPRFGSDESDISKVYLTEKGVEMFGKILYQRPILKGNEK
PKPNAVNEFISPPIQVKYYFNKFGKDGVILSPSDSFEEMRTLYVEGAEAYNREVEM (SEQ ID NO: 607)
>OGPU01000173_31
[human gut metagenome]
MSMTPSTFLPKREGGVPYIAEVQSIPLSPSAYSVIIKDKSIFETSLSPNGSVSMSSFLTSIFDSAYIASLKYKSGDNYKYIGIP
LLNAFVKWQIEEIDDGLDDKSKKIIKSYLISKLSAKYEKTKTENAVRVRLSICRDLYDTLSSDDLYYENKVYSLTLRRFLKAVY
EDYALLSDCERERLIFADNIIKINEVIKQNGSRYYSFIYAYSNMYSREKRRIRLIPYRIVSDEYKMYNYLVCLSDEKSAGKEFK
ADSYRISRLSGLSIAEKLSQKEYSSVTEYERLKEGHVKSVKHLLSDPRFGSDESDISKVYLTEKGVEMFGKILYQRPILKGNEK
PKPNAVNEFISPPIQVKYYFNKFGKDGVILSPSDSFEEMRTLYVEGAEAYNREVEK (SEQ ID NO: 608)
>OGPY01000296_5
[human gut metagenome]
MLIPPSTFLPKRDKNVPYIAEVQSIPLSPSAYSVIIKDKSIFETSLSPNGSVSMSSFLTSIFDSAYIASLKYKSDDNYKYIGIP
LLNAFVEWQIEEIDDSLDDKSKEIIKSYLISKLSAKYEKTKTENAVRVRLSICRDLYDTLSSDDLYYENKVYSLTLRRFLKAVY
EDYALLSDCERERLIFADNIIKINEVIKQNGSRYYSFIYAYSNMYSREKRRIRLIPYRIVSDEYKMYNYLVCLSDEKSAGKEFK
ADSYRISRLSGLSIAEKLSQKEYSSVTEYERLKEGHVKSVKHLLSDPRFGSDESDISKVYLTEKGVEMFGKILYQRPILKGNEK
PKPNTVNEFISPPIQVKYYFNKFGKDGVILSPSDSFEEMRTLYVEGAEAYNREVEI (SEQ ID NO: 609)
>OGQH01000331_47
[human gut metagenome]
MLIPPSTFLPKRDKNVPYIAEVQSIPLSPSAYSVIIKDKSIFETSLSPNGSVSMSSFLTSIFDSAYIASLKYKSDDNYKYIGIP
LLNAFVKWQIEEIDDGLDDKSKEIIKSYLISKLSAKYEKTKTENAVRVRLSICRDLYDTLSSDDLYYENKVYSSTLRRFLKAVY
EDYALLSDCERERLIFADNIIKINEVIKQNGSRYYSFIYAYSNMYSREKRRIRLIPYRIVSDEYKMYNYLVCLSDEKSASKEFK
ADSCRISRLSGLSIAEKLSQKEYSSVTEYERLKEVHVKSVKHLLSDPRFGSDESDISKVYLTEKGVEMFGKILYQRPILKGNEK
PKPNAVNEFISPPIQVKYYFNKFGKDGVILSPSDSFEEMRTLYVEGAEAYNREVEM (SEQ ID NO: 610)
>OGQ001007270_1
[human gut metagenome]
MSMTPSTFLPKREGGVPYIAEVQSIPLSPSAYSVIIKDKSIFETSLSPNGSVSMSSFLTRIFDSAYIASLKYKSEEYNGIPLLN
AFVQWQIEEIDDSLDDKSKEIIKSYLISKLSAKYEKTKTENAVRVRLSICRDLYDTLSSDDLYYENKVYSSTLRRFLKAVYEDY
ALLSDCERERLIFADNIIKINEVIKQNGSRYYSFIYAYSNMYSREKRRIRLIPYRIVSDEYKMYNYLVCLSDEKSAGKEFKADS
YRISRLSGLSIAEKLSQKEYSSVTEYERLKEVHVKSVKHLLSDPRFGSDESDISKVYLTEKGVEMFGKILYQRPILKGNEKPKP
NTVNEFISPPIQVKYYFNKFGKDGVILSPSDSFEEMRTLYVEGAEAYNREVEK (SEQ ID NO: 611)
>OGRA01000610_25
[human gut metagenome]
MSMTPSTFLPKREGGVPYIAEVQSIPLSPSAYSVIIKDKSIFETSLSPNGSVSMSSFLTSIFDSAYIASLKYKSDDNYKYIGIP
LLNAFVEWQIEEIDDSLDDKSKEIIKSYLISKLSAKYEKTKTENAVRVRLSICRDLYDTLSSDDLYYENKVYSSTLRRFLKAVY
EDYALLSDCERERLLFADNIIKINEVIKQNGSRYYSFIYAYSNMYSREKHRIRLIPYRIVSDEYKMYNYLVCLSDEKSAGKEFK
ADSYRISRLSGLSIAEKLSQKEYSSVTEYERLKEGHVKSVKHLLSDPRFGSDESDISKVYLTEKGVEMFGKILYQRPILKGNEK
PKPNAVNEFISPPIQVKYYFNKFGKDGVILSPSDSFEEMRTLYVEGAEAYNRVVEM (SEQ ID NO: 612)
>OG5D01001176_17
[human gut metagenome]
MSMTPSTFLPKREDGVPYIAEVQSIPLSPSAYSVIIKDKSIFETSLSPNGSVSMSSFLTSIFDSAYIASLKYKSNDNYKYIGIP
LLNAFVQWQIEEIDDSLDDKSKEIIKSYLISKLSAKYEKTKTENAVRVRLSICRDLYDTLSSDDLYYENKVYSSTLRRFLKAVY
EDYALLSDCERERLIFADNIIKINEVIKQNGSRYYSFIYAYSNMYSREKRRIRLIPYRIVSDEYKMYNYLVCLSDEKSAGKEFK
ADSCRISRLSGLSIAEKLSQKEYSSVTEYERLKESHVKSVKHLLSDPRFGSDESDISKVYLTEKGVEMFGKILYQRPILKGNEK
PKPNAVNEFISPPIQVKYYFNKFGKDGVIISPSDSFEEMRTLYVEGAEAYNREVEM (SEQ ID NO: 613)
>OGXI01000433_8
[human gut metagenome]
MLIPPSTFLPKREDGVPYIAEVQSIPLSPSAYSVIIRDKSIFETSLSPNGSVSMSSFLTSIFDSAYIASLKYKSDDNYKYIGIP
LLNAFVEWQIKEINDGLDDKSKEIIKSYLISKLSAKYEKTKTENAVRVRLSICRDLYDTLSSDDLYYENKVYSSTLRRFLKAVY
EVYALLSDCERERLLFADNIIKINEVIKQNGSRYYSFIYAYSNMYSREKHRIRLIPYRIVSDEYKMYNYLVCLSDEKSAGKEFK
ADSYRISRLSGLSIAEKLSQKEYSSVTEYERLKEVHVKSVKHLLSDPRFGSDESDISKVYLTEKGVEMFGKILYQRPILKGNEK
PKPNAVNEFISPPIQVKYYFNKFGKDGVILSPSDSFEEMRTLYVEGAEAYNREVEM (SEQ ID NO: 614)
>OGXJ01002463_4
[human gut metagenome]
MSMTPSTFLPKREKNATYIAEVQSIPLSPAAYSVIIKDKSIFETSLSPNGSVSMSSFLTSIFDSAYIASLKYKTDDNYKYIGIP
LLNAFIKWQIEEIDDGLDDKSKEIIKSYLISKFSAKYEKTKTENAVRVRLSICRDLYDTLSSDDLYYENKVYSSTLRRFLKAVY
EDYALLSDCERERLIFADNIIKINEVIKQNGNRYYSFIYAYSNMYSREKRRIRLIPYRIISDEYKMYNYLVCLSDEKSAGKEFK
ADSCRISRLSGLSIAEKLSQKEYSSVTEYERLKEGHVKSVKHLLSDPRFGSDESDISKVYLTEKGVEMFGKILYQRPILKGNEK
PKPNAVNEFISPPIQVKYYFNKFGKDGVILSPSDSFEEMRTLYVEGAEAYNREVEK (SEQ ID NO: 615)
>OGXL01002096_9
[human gut metagenome]
MSMTPSTFLPKRDTNIPYIAEVQSIPLSPSAYAVIVKDKSIFETSLFPNGGSVSMSSFLTRIFDSAYIASLKYKSEEYNGIPLL
NAFVQWQIEEIDDSLDDKSKEIIKSYLISKLSAKYEKTKTENAVRVRLSICRDLYDTLSSDDLYYENKVYSSTLRRFLKAVYED
YALLSDCERERLIFADNIIKINEVIKQNGSRYYSFIYAYSNMYSREKRRIRLIPYRIVSDEYKMYNYLVCLSDEKSAGKEFKAD
SCRISRLSGLSIAEKLSQKEYSCVTEYERLKEVHVKSVKHLLSDPRFGSDESDISKVYLTEKGVEMFGKILYQRPILKGNEKPK
PNAVNEFISPPIQVKYYFNKFGKDGVIISPSDSFEEMRTLYVEGAEAYNREVEM (SEQ ID NO: 616)
>OGYY01000371_36
[human gut metagenome]
MLIPPSTFLPKREGGVPYIAEVQSIPLSPSAYSVIIKDKSIFETSLSPNGSVSMSSFLTSIFDSAYIASLKYKSEKYNGIPLLN
AFVKWQIEEIDDGLDDKSKEIIKSYLISKLSAKYKKTKTENAVRVRLSISRDLYDTLSSDDLYYENKVYSSTLRRFLKAVYEDY
ALLSDCERERLIFADNIIKINEVIKQNGSRYYSFIYAYSNMYSREKHRIRLIPYRIVSDEYKMYNYLVCLSDEKSAGKEFKADS
CRISRLSGLSIAEKLSQKEYSSVTEYERLKEGHVKSVKHLLSDPRFGSDESDISKVYLTEKGVEMFGKILYQRPILKGNEKPKP
NAVNEFISPPIQVKYYFNKFGKDGVILSPSDSFEEMRTLYVEGAEAYNREVEM (SEQ ID NO: 617)
>OHAI01000724_6
[human gut metagenome]
MLIPTSTFLPKREGGVPYIAEVQSIPLSPSAYSVIIKDKSIFETSLSPNGSVSMSSFLTSIFDSAYIASLKYKSDDNYKYIGIP
LLNAFVKWQIEEIDDGLDDKNKEIIKSYLISKLSAKYEKTKTENAVRVRLSICRDLYDTLSSDDLYYENKVYSSTLRRFLKAVY
EDYALLSDCERERLLFADNIIKINEVIKQNGSRYYSFIYAYSNMYSREKRLIRLIPYRIVSDEYKMYNYLVCLSDEKSAGKEFK
ADSYRISRLSGLSIAEKLSQKEYSSVTEYERLKEGHVKSVKHLLSDPRFGSDESDISKVYLTEKGVEMFGKILYQRPILKGNEK
PKPNAVNEFISPPIQVKYYFNKFGKDGVILSPSDSFEEMRTLYVEGAEAYNREVEK (SEQ ID NO: 618)
>OHAN01001071_10
[human gut metagenome]
MSMTPSTFLPKREGGVPYIAEVQSIPLSPSAYSVIIKDKSIFETSLSPNGSVSMSSFLTSIFDSAYIASLKYKSDDNYKYIGIP
LLNAFVEWQIEEIDDGLDDKSKEIIKSYLISKLSAKYEKTKTENAVRVRLSICRDLYDTLSSDDLYYENKVYSLTLRRFLKAVY
EDYALLSDCERERLIFADNIIKINEIIKQNGSRYYSFIYAYSNMYSREKRRIRLIPYRIVSDEYKMYNYLVCLSDEKSAGKEFK
ADSYRISRLSGLSIAEKLSQKEYSSVTEYERLKEVHVKSVKHLLSDPRFGSDESDISKVYLTEKGVEMFGKILYQRPILKGNEK
PKPNAVNEFISPPIQVKYYFNKFGKDGVILSPSDSFEEMRTLYVEGAEAYNREVKM (SEQ ID NO: 619)
>OHAR01000226_10
[human gut metagenome]
MLIPPSTFLPKRDKNATYIAEVQSIPLSPSAYSVIIKDKSIFETSLSPNGSVSMSSFLTSIFDSAYIASLKYKSDDNYKYIGIP
LLNAFVKWQIEEIDDSLDDKSKEIIKSYLISKLSAKYEKTKTENAVRVRLSICRDLYDTLSSDDLYYENKVYSLTLRRFLKAVY
EDYALLSDCERERLIFADNIIKINEVIKQNGSRYYSFIYAYSNMYSREKRRIRLIPYRIVSDEYKMYNYLVCLSDEKSAGKEFK
ADSYRISRLSGLSIAEKLSQKEYSSVTEYERLKEGHVKSVKHLLSDPRFGSDESDISKVYLTEKGVEMFGKILYQRPILKGNEK
PKPNAVNEFISPPIQVKYYFNKFGKDGVILSPSDSFEEMRTLYVEGAEAYNREVEM (SEQ ID NO: 620)
>OHBL01000590_6
[human gut metagenome]
MSMTPSTFLPKREDGVPYIAEVQSIPLSPSAYSVIIKDKSIFETSLSPNGSVSMSSFLTSIFDSAYIASLKYKSEKYNGIPLLN
AFVKWQIEEIDDSLDDKSKEIIKSYLISKLSAKYEKTKTENAVRVRLSICRDLYDTLSSDDLYYENKVYSSTLRRFLKAVYEDY
ALLSDCERERLIFADNIIKINEVIKQNGSRYYSFIYAYSNMYSREKRRIRLIPYRIVSDEYKMYNYLVCLSDEKSAGKEFKADS
YRISRLSGLSIAEKLSQKEYSSVTEYERLKEGHVKSVKHLLSDPRFGSDESDISKVYLTEKGVEMFGKILYQRPILKGNEKPKS
NAVNEFISPPIQVKYYFNKFGKDGVIISPSDSFEEMRTLYVEGAEAYNRVVEM (SEQ ID NO: 621)
>OHBW01001448_2
[human gut metagenome]
MSMTPSTFLPKREGGVPYIAEVQSIPLSPSAYSVIIKDKSIFETSLSPNGSVSMSSFLTSIFDSAYIASLKYKSDDNYKYIGIP
LLNAFVEWQIEEIDDSLDDKSKEIIKSYLISKLSAKHEKTKTENAVRVRLSICRDLYDTLSSDDLYYENKVYSSTLRRFLKAVY
EDYALLSDCERERLLFADNIIKINEVIKQNGSRYYSFIYAYSNMYSREKRLIRLIPYRIVSDEYKMYNYLVCLSDEKSAGKEFK
ADSYRISRLSGLSIAEKLSQKEYSSVTEYERLKEGHVKSVKHLLSDPRFGSDESDISKVYLTEKGVEMFGKILYQRPILKGNEK
PKPNAVNEFISPPIQVKYYFNKFGKDGVILSPSDSFEEMRTLYVEGAEAYNREVEK (SEQ ID NO: 622)
>OHCE01000125_19
[human gut metagenome]
MLIPPSTFLPKREGGVPYIAEVQSIPLSPSAYSVIIKDKSIFETSLSPNGSVSMSSFLTSIFDSAYIASLKYKSDDNYKYIGIP
LLNAFVKWQIEEIDDGLDDKSKEIIKSYLISKLSAKYKKTKTENAVRVRLSICRGLYDTLSSDDLYYENKVYSSTLRRFLKAVY
EDYALLSDCERERLIFADNIIKINEVIKQNGSRYYSFIYAYSNMYSREKRRIRLIPYRIVSDEYKMYNYLVCLSDEKSAGKEFK
ADSYRISRLSGLSIAEKLSQKEYSSVTEYERLKEGHVKSVKHLLNDPRFGSDESDISKVYLTEKGVEMFGKILYQRPILKGNEK
PKPNAVNEFISPPIQVKYYFNKFGKDGVILSPSDSFEEMRTLYVEGAEAYNREVEM (SEQ ID NO: 623)
>OHCW01000317_6
[human gut metagenome]
MSMTPSTFLPKREDGVPYIAEVQSIPLSPSAYSVIIKDKSIFETSLSPNGSVSMSSFLTSIFDSAYIASLKYKSNDNYKYIGIP
LLNAFVEWQIEEIDDGLDDKSKEIIKSYLISKLSAKYEKTKTENAVRVRLSICRDLYDTLSSDDLYYENKVYSSTLRRFLKAVY
EDYALLSDCERERLIFADNIIKINEVIKQNGSRYYSFIYAYSNMYSREKRRIRLIPYRIVSDEYKMYNYLVCLSDEKSAGKEFK
ADSYRISRLSGLSIAEKLSQKEYSSVTEYERLKEGHVKSVKHLLSDPRFGSDESDISKVYLTEKGVEMFGKILYQRPILKGNEK
PKPNAVNEFISPPIQVKYYFNKFGKDGVILSPSDSFEEMRTLYVEGAEAYNREVEK (SEQ ID NO: 624)
>OHEL01001488_5
[human gut metagenome]
MLIPPSTFLPKREGGVPYIAEVQSIPLSPSAYSVIIKDKSIFETSLFPNGSVSMSSFLTSIFDSAYIASLKYKSDDNYKYIGIP
LLNAFVEWQIEEIDDGLDDKSKEIIKSYLISKLSAKYKKTKTENAVRVRLSICRDLYDTLSSDDLYYENKVYSSTLRRFLKAVY
EDYTLLSDCERERLIFADNIIKINEVIKQNGSRYYSFIYAYSNMYSREKRRIRLIPYRIVSDEYKMYNYLVCLSDEKSAGKEFK
ADSYRISRLSGLSIAEKLSQKEYSSVTEYERLKEGHVKSVKHLLSDPRFGSDESDISKVYLTEKGVEMFGKILYQRPILKGNEK
PKPNAVNEFISPPIQVKYYFNKFGKDGVILSPSDSFEEMRTLYVEGAEAYSREVEM (SEQ ID NO: 625)
>OHFX01001477_2
[human gut metagenome]
MSMTPSTFLPKREDGVPYIAEVQSIPLSPSAYSVIIKDKSIFETSLSPNGSVSMSSFLTSIFDSAYIASLKYKSEKYNGIPLLN
AFVKWQIEEIDDSLDDKSKEIIKSYLISKLSAKYEKTKTENAVRVRLSICRDLYDTLSSDDLYYENKVYSSTLRRFLKAVYEDY
ALLSDCERERLIFADNIIKINEVIKQNGSRYYSFIYAYSNMYSREKRRIRLIPYRIVSDEYKMYNYLVCLSDEKSAGKEFKADS
YRISRLSGLSIAEKLSQKEYSSVTEYERLKEVHVKSVKHLLSDPRFGSDESDISKVYLTEKGVEMFGKILYQRPILKGNEKPKP
NTVNEFISPPIQVKYYFNKFGKDGVILSPSDSFEEMRTLYVEGAEAYNREVEK (SEQ ID NO: 626)
>OHGX01000264_3
[human gut metagenome]
MSMTPSTFLPKREDGVPYIAEVQSIPLSPSAYSVIIKDKSIFETSLSPNGSVSMSSFLTSIFDSAYIASLKYKSDDNYKYIGIP
LLNAFVEWQIEEIDDSLDDKSKEIIKSYLISKLSAKHEKTKTENAVRVRLSICRDLYDTLSSDDLYYENKVYSSTLRRFLKAVY
EDYALLSDCERERLLFADNIIKINEVIKQNGSRYYSFIYAYSNMYSREKRRIRLIPYRIVSDEYKMYNYLVCLSDEKSAGKEFK
ADSYRISRLSGLSIAEKLSQKEYSSVTEYERLKEGHVKSVKHLLSDPRFGSDESDISKVYLTEKGVEMFGKILYQRPILKGNEK
PKPNAVNEFISPPIQVKYYFNKFGKDGVILSPSDSFEEMRTLYVEGAEAYNREVEM (SEQ ID NO: 627)
>OHJS01001864_5
[human gut metagenome]
MSMTPSTFLPKREGGVPYIAEVQSIPLSPSAYSVIIKDKSIFETSLSPNSSVSMSSFLTSIFDSAYIASLKYKSDDNYKYIGIP
LLNAFVKWQIEEIDDDIDDKSKEIIKSYLISKLSAKYKKTKTENAVRVRLSICRDLYDTLSSDDLYYENKVYSSTLRRFLKAVY
EDYALLSDCERERLLFADNIIKINEVIKQNGSRYYSFIYAYSNMYSREKRRIRLIPYRIVSDEYKMYNYLVCLSDEKSAGKEFK
ADSYRISRLSGLSIAEKLSQKEYSSVTEYERLKEGHVKSVKHLLSDPRFGSDESDISKVYLTEKGVEMFGKILYQRPILKGNEK
PKPNAVNEFISPPIQVKYYFNKFGKDGVILSPSDSFEEMRTLYVEGAEAYNREVEM (SEQ ID NO: 628)
>OHKC01000402_6
[human gut metagenome]
MLIPPSTFLPKRDKNATYIAEVQSIPLSPSAYSVIIKDKSIFETSLSPNGSVSMSSFLTSIFDSAYIASLKYKSDDNYKYIGIP
LLNAFVKWQIEEIDDSLDDKSKEIIKSYLISKLSAKYEKTKTENAVRVRLSICRDLYDTLSSDDLYYENKVYSLTLRRFLKAVY
EDYALLSDCERERLIFADNIIKINEVIKQNGSRYYSFIYAYSNMYSREKRRIRLIPYRIVSDEYKMYNYLVCLSDEKSAGKEFK
ADSYRISRLSGLSIAEKLSQKEYSSVTEYERLKEGHVKSVKHLLSDPRFGSDESDISKVYLTEKGVEMFGKILYQRPILKGKAQ
AQRCQRVHLPAYPSQILFQ (SEQ ID NO: 629)
>OHMF01000395_25
[human gut metagenome]
MSMTPSTFLPKREDGVPYIAEVQSIPLSPSAYSVIIRDKSIFETSLSPNGNVSMSSFLTSIFDSAYIASLKYKSDDNYKYIGIP
LLNAFVKWQIEEIDDDLDDKSKEIIKSYLISKLSAKYEKTKTENAVRVRLSICRDLYDTLSSDDLYYENKVYSSTLRRFLKAVY
EDYALLSDCERERLIFADNIIKINEVIKQNGSRYYSFIYAYSNMYSREKRRIRLIPYRIVSDEYKMYNYLVCLSDEKSAGKEFK
ADSYRISRLSGLSIAEKLSQKEYSSVTEYERLKEVHVKSVKHLLSDPRFGSDESDISKVYLTEKGVEMFGKILYQRPILKGNEK
PKPNAVNEFISPPIQVKYYFNKFGKDGVILSPSDSFEEMRTLYVEGAEAYNRVVEM (SEQ ID NO: 630)
>OHUY01000263_5
[human gut metagenome]
MLMTPSTFLPKREGGVPYIAEVQSIPLSPSAYSVIIKDKSIFETSLSPNGSVSMSSFLTSIFDSAYIASLKYKSDDNYKYIGIP
LLNAFVKWQIEEIDDGLDDKSKKIIKSYLISKLSAKYKKTKTENAVRVRLSICRDLYDTLSSDDLYYENKVYSSTLRRFLKAVY
EDYALLSDCERERLLFADNIIKINEVIKQNGSRYYSFIYAYSNMYSREKRRIRLIPYRIVSDEYKMYNYLVCLSDEKSEGKEFK
ADSYRISRLSGLSISEKLSQKEYSSVTEYERLKEGHVKSVKHLLSDPRFGSDESDISKVYLTEKGVEMFGKILYQRPILKGNEK
PKPNAVNEFISPPIQVKYYFNKFGKDGVILSPSDSFEEMRTLYVEGAEAYNREVEK (SEQ ID NO: 631)
>OIXA01002812_2
[human gut metagenome]
MLIPPSTFLPKREGGVPYIAEVQSIPLSPSAYSVIIKDKSIFETSLSPNGSVSMSSFLTSIFDSTYIASLKYKSDDNYKYIGIP
LLNAFVEWQIEEIDDGLDDKSKEIIKSYLISKLSAKYEKTKTENAVRVRLSICRDLYDTLSSDDLYYENKVYSSTLRRFLKAVY
EDYALLSDCERERLLFADNIIKINEVIKQNGSRYYSFIYAYSNMYSREKHRIRLIPYRIVSDEYKMYNYLVCLSDEKSAGKEFK
ADSYRISRLSGLSIAEKLSQKEYSSVTEYERLKEGHVKSVKHLLSDPRFGSDESDISKVYLTEKGVEMFGKILYQRPILKGNEK
PKPNAVNEFISPPIQVKYYFNKFGKDGVILSPSDSFEEMRTLYVEGAEAYNREVEM (SEQ ID NO: 632)
>OIYU01000175_5
[human gut metagenome]
MSMTPSTFLPKREDGVPYIAEVQSIPLSPSAYSVIIKDKSIFETSLSPNGSVSMSSFLTSIFDSAYIASLKYKSDDNYKYIGIP
LLNAFVKWQIEEIDDSLDDKSKEIIKSYLISKLSAKYEKTKTENAVRVRLSICRDLYDTLSSDDLYYENKVYSSTLRRFLKAVY
EDYALLSDCERERLIFADNIIKINEVIKQNGSRYYSFIYAYSNMYSREKRRIRLIPYRIVSDEYKMYNYLVCLSDEKSAGKEFK
ADSYRISRLSGLSIAEKLSQKEYSSVTEYERLKEGHVKSVKHLLSDPRFGSDESDISKVYLTEKGVEMFGKILYQRPILKGNEK
PNAVNEFISPPIQVKYYFNKFGKDGVILSPSDSFEEMRTLYVEGAEAYNREVEM (SEQ ID NO: 633)
>OIZW01000344_21
[human gut metagenome]
MSMTPSTFLPKREGGVPYIAEVQSIPLSPSAYSVIIKDKSIFETSLSPNGSVSMSSFLTSIFDSAYIASLKYKSDDNYKYIGIP
LLNAFVQWQIEEIDDGLDDKSKEIIKSYLISKLSAKYEKTKTENAVRVRLSICRDLYDTLSSDDLYYENKVYSSTLRRFLKAVY
EDYALLSDCERERLLFADNIIKINEVIKQNGSRYYSFIYAYSNMYSREKRLIRLIPYRIVSDEYKMYNYLVCLSDEKSAGKEFK
ADSCRISRLSGLSIAEKLSQKEYSSVTEYERLKEGHVKSVKHLLSDPRFGSDESDISKVYLTEKGVEMFGKILYQRPILKGNEK
PKPNAVNEFISPPIQVKYYFNKFGKDGIILSPSDSFEEMRTLYVEGAEAYNREVEM (SEQ ID NO: 634)
>OJMJ01002228_2
[human gut metagenome]
MLIPPSTFLPKREGGVPYIAEVQSIPLSPSAYSVIIKDKSIFETSLSPNGSVSMSSFLTSIFDSAYIASLKYKSDDNYKYIGIP
LLNAFVEWQIEEIDDGLDDKSKEIIKSYLISKLSAKYEKTKTENAVRVRLSICRDLYDTLSSDDLYYENKVYSSTLRRFLKAVY
EDYALLSDCKRERLLFAENIIKINEVIKQNGSRYYSFIYAYSNMYSREKRRISLIPYRIVSDEYKMYNYLVCLSDEKSAGKEFK
ADSYRISRLSGLSIAEKLSQKEYSSVTEYERLKEGRVKSVKHLLSDPRFGSDESDISKVYLTEKGVEMFGKILYQRPILKGNEK
PKPNAVNEFISPPIQVKYYFNKFGKDGVILSPSDSFEEMRTLYVEGAEAYNREVEM (SEQ ID NO: 635)
>OJMN01000417_21
[human gut metagenome]
MSMTPSTFLPKRDKNATYIAEVQSIPLSPSAYSVIIKDKSIFETSLSPNGSVSMSSFLTSIFDSAYIASLKYKSDDNYKYIGIP
LLNAFVKWQIEEINDSLDDKSKEIIKSYLISKLSAKYEKTKTENAVRVRLSICRDLYDTLSSDDLYYENKVYSSTLRRFLKAVY
EDYALLSDCERERLLFADNIIKINEVIKQNGSRYYSFIYAYSNMYSREKRRIRLIPYRIVSDEYKMYNYLVCLSDEKSAGKEFK
ADSCRISRLSGLSIAEKLSQKEYSSVTEYERLKEGHVKSVKHLLSDPRFGSDESDISKVYLTEKGVEMFGKILYQRPILKGNEK
PKPNAVNEFISPPIQVKYYFNKFGKDGVIISPSDSFEEMRTLYVEGAEAYNREVEM (SEQ ID NO: 636)
>OJOH01001697_5
[human gut metagenome]
MLIPPSTFLPKRDKNVPYIAEVQSIPLSPSAYSVIIKDKSIFETSLSPNGSVSMSSFLTSIFDSAYIASLKYKSDDNYKYIGIP
LLNAFVEWQIEEIDDSLDDKSKEIIKSYLISKLSAKYEKTKTENAVRVRLSICRDLYDTLSSDDLYYENKVYSLTLRRFLKAVY
EDYALLSDCERERLIFADNIIKINEVIKQNGSRYYSFIYAYSNMYSREKRRIRLIPYRIVSDEYKMYNYLVCLSDEKSAGKEFK
ADSYRISRLSGLSIAEKLSQKEYSSVTEYERLKEGHVKSVKHLLSDPRFGSDESDISKVYLTEKGVEMFGKILYQRPILKGNEK
PKPNTVNEFISPPIQVKYYFNRFGKDGVILSPSDSFEEMRTLYVEGAEAYNREVEI (SEQ ID NO: 637)
>OJPG01000139_77
[human gut metagenome]
MSMTPSTFLPKREDGVPYIAEVQSIPLSPSAYSVIIKDKSIFETSLSPNGSVSMSSFLTSIFDSAYIASLKYKSDDNYKYIGIP
LLNAFVEWQIEEIDDGLDDKSKEIIKSYLISKLSAKYEKTKTENAVRVRLSICRDLYDTLSSDDLYYENKVYSSTLRRFLKAVY
EDYALLSDCERERLIFADNIIKINEVIKQNGSRYYSFIYAYSNMYSREKRRIRLIPYRIVSDEYKMYNYLVCLSDEKSAGKEFK
ADSYRISRLSGLSIAEKLSQKEYSSVTEYERLKEVHVKSVKHLLSDPRFGSDESDISKVYLTEKGVEMFGKILYQRPILKGNEK
PKPNAVNEFISPPIQVKYYFNKFGKDGVILSPSDSFEEMRTLYVEGAEAYNREVEI (SEQ ID NO: 638)
>OJPX01000614_6
[human gut metagenome]
MLIPPSTFLPKREGGVPYIAEVQSIPLSPSAYSVIIKDKSIFETSLSPNGSVSMSSFLTSIFDSAYIASLKYKSDDNYKYIGIP
LLNAFVKWQIEEIDDGLDDKSKEIIKSYLISKLSAKYEKTKTENAVRVRLSICRDLYDTLSSDDLYYENKVYSSTLRRFLKAVY
EDYALLSDCERERLLFADNIIKINEVIKQNGSRYYSFIYAYSNMYSREKRRIRLIPYRIVSDEYKMYNYLVCLSDEKSAGKEFK
ADSYRISRLSRLSIAEKLSQKEYSSVTEYERLKEGHVKSVKHLLSDPRFGSDESDISKVYLTEKGVEMFGKILYQRPILKDNEK
PKPNAVNEFISPPIQVKYYFNKFGKDGVILSPSDSFEEMRTLYVEGAEAYNREVEM (SEQ ID NO: 639)
>OKRZ01002949_4
[human gut metagenome]
MFIPPSTFLPKREGGVPYIAEVQSIPLSPSAYSVIIKDKSIFETSLSPNGSVSMSSFLTSIFDSAYIASLKYKSDDNYKYIGIP
LLNAFVEWQIEEIDDGLDDKSKEIIKGYLISKLSAKYEKTKTENAVRVRLSICRDLYDTLSSDDLYYENKVYSSTLRRFLKAVY
EDYALLSDCERERLIFADNIIKINEVIKQNDSRYYSFIYAYSNMYSREKHRIRLIPYRIVSDEYKMYNYLVCLSDEKSAGKEFK
ADSYRISRLSGLSIAEKLSQKEYSSVTEYERLKEGHVKSVKHLLSDPRFGSDESDISKVYLTEKGVEMFGKILYQRPILKGNEK
PKPNAVNEFISPPIQVKYYFNKFGKDGVILSPSDSFEEMRTLYVEGAEAYNREVEM (SEQ ID NO: 640)
>OKSD01002505_10
[human gut metagenome]
MLIPPSTFLPKRDKNATYIAEVQSIPLSPSAYSVIIKDKSIFETSLSPNGSVSMSSFLTSIFDSAYIASLKYKSEKYNDIPLLN
AFVKWQIEEIDDGLDDKSKEIIKSYLISKLSAKYEKTKTENAVRVRLSICRDLYDTLSSDDLYYENKVYSSTLRRFLKAVYEDY
ALLSDCERERLLFADNIIKINEVIKQNGSRYYSFIYAYSNMYSREKRRIRLIPYRIVSDEYKMYNYLVCLSDEKSAGKEFKADS
YRISRLSGLSIAEKLSQKEYSSVTEYERLKEVHVKSVKHLLSDPRFGSDESDISKVYLTEKGVEMFGKILYQRPILKGNEKPKP
NAVNEFISQPIQVKYYFNKFGKDGVILSPSDSFEEMRTLYVEGAEAYNREVEM (SEQ ID NO: 641)
>OLGN01000304_31
[human gut metagenome]
MSMTPSTFLPKRDTNIPYIAEVQSIPLSPSAYAVIVKDKSIFETSLSPNGSVSMSSFLTSIFDSAYIASLKYKSEKYNGIPLLN
AFVKWQIEEIDDSLDDKSKEIIKSYLISKLSAKYEKTKTENAVRVRLSICRDLYDTLSSDDLYYENKVYSSTLRRFLKAVYEDY
ALLSDCERERLIFADNIIKINEVIKQNGSRYYSFIYAYSNMYSREKRRIRLIPYRIVSDEYKMYNYLVCLSDEKSAGKEFKADS
YRISRLSGLSIAEKLSQKEYSSVTEYERLKEGHVKSVKHLLSDPRFGSDESDISKVYLTEKGVEMFGKILYQRPILKGNEKPKP
NAVNEFISPPIQVKYYFNKFGKDGVILSPSDSFEEMRTLYVEGAEAYNREVEM (SEQ ID NO: 642)
>OLHE01000257_40
[human gut metagenome]
MSMTPSTFLPKREGGVPYIAEVQSIPLSPSAYSVIIKDKSIFETSLSPNGSVSMSSFLTSIFDSAYIASLKYKTDDNYKYIGIP
LLNAFVKWQIEEIGDSLDDKSKEIIKSYLISKLSAKYEKTKTENAVRVRLSICRDLYDTLSSDDLYYENKVYSSTLRRFLKAVY
EDYALLSDCERERLIFADNIIKINEVIKQNGSRYYSFIYAYSNMYSREKRRIRLIPYRIVSDEYKMYNYLVCLSDEKSAGKEFK
ADSYRISRLSGLSIAEKLSQKEYSSVTEYERLKEGHVKSVKHLLSDPRFGSDESDISKVYLTEKGVEMFGKILYQRPILKGNEK
PKPNAVNEFISPPIQVKYYFNKFGKDGVILSPSDSFEEMRTLYVEGAEAYNRVVEM (SEQ ID NO: 643)
>PPYE01106492_32
[human gut metagenome]
MSMTPSTFLPKRDTNVPYIAEVQSIPLSPSAYSVIIKDKSIFETSLSPNGSVSMSSFLTSIFDSAYIASLKYKSEKYNGIPLLN
AFVKWQIEEIDDSLDDKSKEIIKSYLISKLSAKYEKTKTENAVRVRLSICRDLYDTLSSDDLYYENKVYSSTLRRFLKAVYEDY
ALLSDCERERLIFADNIIKINEVIKQNGSRYYSFIYAYSNMYSREKRRIRLIPYRIVSDEYKMYNYLVCLSDEKSAGKEFKADS
YRISRLSGLSIAEKLSQKEYSSVTEYERLKEGHVKSVKHLLSDPRFGSDESDISKVYLTEKGVEMFGKILYQRPILKGNEKPKP
NAVNEFISPPIQVKYYFNKFGKDGVILSPSDSFEEMRTLYVEGAEAYNREVEM (SEQ ID NO: 644)
>PPYE01385196_4
[human gut metagenome]
MLIPPSTFLPKRDKNATYIAEVQSIPLSPSAYSVIIKDKSIFETSLSTNGSVSMSSFLTSIFDSAYIASLKYKSDDNYKYIGIP
LLNAFVKWQIEEIDDDLDDKSKEIIKSYLISKLSAKYEKTKTENAVRVRLSISRDLYDTLSSDDLYYENKVYSSTLRRFLKAVY
EDYALLSDCERERLIFADNIIKINEVIKQNGSRYYSFIYAYSNMYSREKRRIRLIPYRIVSDEYKMYNYLVCLSDEKSAGKEFK
ADSCRISRLSGLSIAEKLSQKEYSSVTEYERLKEGHVKSVKHLLSDPRFGSDESDISKVYLTEKGVEMFGKILYQRPILKGNEK
PKPNAVNEFISPPIQVKYYFNKFGKDGVILSPSDSFEEMRTLYVEGAEAYNREVEK (SEQ ID NO: 645)
>PPYE01512733_2
[human gut metagenome]
MSMTPSTFLPKREDGVPYIAEVQSIPLSPSAYSVIIKDKSIFETSLSPNGSVSMSSFLTSIFDSAYIASLKYKSEKYNGIPLLN
AFVKWQIEEIDDSLDDKSKEIIKSYLISKLSAKYEKTKTENAVRVRLSICRDLYDTLSSDDLYYENKVYSSTLRRFLKAVYEDY
ALLSDCERERLIFADNIIKINEVIKQNGSRYYSFIYAYSNMYSREKHRIRLIPYRIVSDEYKMYNYLVCLSDEKSAGKEFKADS
YRISRLSGLSIAEKLSQKEYSSVTEYERLKEVHVKSVKHLLSDPRFGSDESDISKVYLTEKGVEMFGKILYQRPILKGNEKPKP
NTVNEFISPPIQVKYYFNKFGKDGVILSPSDSFEEMRTLYVEGAEAYNREVEM (SEQ ID NO: 646)
>ODFW01000112_41
[human metagenome]
MLIPPSTFLPKREDGVPYIAEVQSIPLSPSAYSVIIKDKSIFETSLSPNGSVSMSSFLTSIFDSAYIASLKYKSDDNYKYIGIP
LLNAFVEWQIEEIDDSLDDKSKEIIKSYLISKLSAKHEKTKTENAVRVRLSICRDLYDTLSSDDLYYENKVYSSTLRRFLKAVY
EDYALLSDCERERLLFADNIIKINEVIKQNGSRYYSFIYAYSNMYSREKRRIRLIPYRIVSDEYKMYNYLVCLSDEKSAGKEFK
ADSYRISRLSGLSIAEKLSQKEYSSVTEYERLKEGHVKSVKHLLSDPRFGSDESDISKVYLTEKGVEMFGKILYQRPILKGNEK
PKPNAVNEFISPPIQVKYYFNKFGKDGVILSPSDSFEEMRTLYVEGAEAYNREVEM (SEQ ID NO: 647)
>ODGN01000188_49
[human metagenome]
MSMTPSTFLPKRDKNATYIAEVQSIPLSPSAYSVIIKDKSIFETSLSPNGSVSMSSFLTSIFDSAYIASLKYKSDDNYKYIGIP
LLNAFVKWQIEEIDDSLDDKSKEIIKSYLISKLSAKYEKTKTENAVRVRLSICRDLYDTLSSDDLYYENKVYSSTLRRFLKAVY
EDYALLSDCERERLIFADNIIKINEVIKQNGSRYYSFIYAYSNMYSREKRRIRLIPYRIVSDEYKMYNYLVCLSDEKSAGKEFK
ADSYRISRLSGLSIAEKLSQKEYSSVTEYERLKEGHVKSVKHLLSDPRFGSDESDISKVYLTEKGVEMFGKILYQRPILKGNEK
PKPNAVNEFISPPIQVKYYFNKFGKDGVILSPSDSFEEMRTLYVEGAEAYNREVEM (SEQ ID NO: 648)
>ODHH01000275_15
[human metagenome]
MSMTPSTFLPKREGGVPYIAEVQSIPLSPSAYSVIIKDKSIFETSLSPNGSVSMSSFLTSIFDSAYIASLKYKSDDNYKYIGIP
LLNAFVKWQIEEIDDSLDDKSKEIIKSYLISKLSAKYEKTKTENAVRVRLSICRDLYDTLSSDDLYYENKVYSLTLRRFLKAVY
EDYALLSDCERERLIFADNIIKINEIIKQNGSRYYSFIYAYSNMYSREKRRIRLIPYRIVSDEYKMYNYLVCLSDEKSAGKEFK
ADSYRISRLSGLSIAEKLSQKEYSSVTEYERLKEGHVKSVKHLLSDPRFGSDESDISKVYLTEKGVEMFGKILYQRPILKGNEK
PKPNAVNEFISPPIQVKYYFNKFGKDGVILSPSDSFEEMRTLYVEGAEAYNREVEM (SEQ ID NO: 649)
>ODHP01001712_4
[human metagenome]
MSMTPSTFLPKREGGVPYIAEVQSIPLSPSAYSVIIKDKSIFETSLSPNGSVSMSSFLTSIFDSAYIASLKYKSDDNYKYIGIP
LLNAFVEWQIEEIDDGLDDKSKEIIKSYLISKLSAKYEKTKTENAVRVRLSICRGLYDTLSSDDLYYENKVYSSTLRRFLKAVY
EDYALLSDCERERLIFADNIIKINEVIKQNGSRYYSFIYAYSNMYSREKRRIRLIPYRIVSDEYKMYNYLVCLSDEKSAGKEFK
ADSYRISRLSGLSIAEKLSQKEYSSVTEYERLKEVHVKSVKHLLSDPRFGSDESDISKVYLTEKGVEMFGKILYQRPILKGNEK
PKPNAVNEFISPPIQVKYYFNKFGKDGVILSPSDSFEEMRTLYVEGAEAYNREVEM (SEQ ID NO: 650)
>ODHV01000466_16
[human metagenome]
MLIPPSTFLPKREDGVPYIAEVQSIPLSPSAYSVIIKDKSIFETSLSTNGSVSMSSFLTSIFDSAYIASLKYKSDDNYKYIGLP
LLNAFVKWQIEEIDDGLDDKSKEIIKSYLISKLSAKYKKTKTENAVRVRLSICRDLYDTLSSDDLYYENKVYSSTLRRFLKAVY
EDYALLSDCERERLIFADNIIKINEVIKQNGSRYYSFIYAYSNMYSREKHRIRLIPYRIVSDEYKMYNYLVCLSDEKSAGKEFK
ADSYRISRLSGLSIAEKLSQKEYSSVTEYERLKEGHVKSLKHLLSDPRFGSDESDISKVYLTEKGVEMFGKILYQRPILKGNEK
PKPNAVNEFISPPIQVKYYFNKFGKDGVILSPSDSFEEMRTLYVEGAEAYNREVEM (SEQ ID NO: 651)
>ODHZ01001211_6
[human metagenome]
MSMTPSTFLPKREDGVPYIAEVQSIPLSPSAYSVIIKDKSIFETSLSPNGSVSMSSFLTSIFDSAYIASLKYKSDDNYKYIGIP
LLNAFVEWQIEEIDDGLDDKSKEIIKSYLISKLSAKYEKTKTENAVRVRLSICRDLYDTLSSDDLYYENKVYSSTLRRFLKAVY
EDYALLSDCERERLLFADNIIKINEVIKQNGSRYYSFIYAYSNMYSREKRRIRLIPYRIVSDEYKMYNYLVCLSDEKSTGKEFK
ADSYRISRLSGLSIAEKLSQKEYSSVTEYERLKEGHVKSVKHLLSDPRFGSDESDISKVYLTEKGVEMFGKILYQRPILKGNEK
PKPNAVNEFISPPIQVKYYFNKFGKDGVILSPNDSFEEMRTLYVEGAEAYNREVEM (SEQ ID NO: 652)
>ODJZ01000182_15
[human metagenome]
MSMTPSTFLPKREGGVPYIAEVQSIPLSPSAYSVIIKDKSIFETSLSPNGSVSMSSFLTSIFDSAYIASLKYKSDDNYKYIGIP
LLNAFVEWQIEEIDDGLDDKSKEIIKSYLISKLSAKYEKTKTENAVRVRLSICRDLYDTLSSDDLYYENKVYSSTLRRFLKAVY
EDYALLSDCERERLLFADNIIKINEVIKQNGSRYYSFIYAYSNMYSREKRRIRLIPYRIVSDEYKMYNYLVCLSDEKSAGKEFK
ADSYRISRLSGLSIAEKLSQKEYSSVTEYERLKEGHVKSVKHLLSDPRFGSDESDISKVYLTEKGVEMFGKILYQRPILKGNEK
PKPNAVNEFISPPIQVKYYFNKFGKDGVILSPSDSFEEMRTLYVEGAEAYNREVEM (SEQ ID NO: 653)
>ODVR01002077_4
[human metagenome]
MLIPPSTFLPKRDKNATYIAEVQSIPLSPSAYSVIIKDKSIFETSLSPNGSVSMSSFLTSIFDSAYIASLKYKSDDNYKYIGIP
LLNAFVKWQIEEIDDGLDDKSKEIIKSYLISKLSAKYEKTKTENAVRVRLSICRDLYDTLSSDDLYYENKVYSSTLRRFLKAVY
EDYALLSDCERERLLFADNIIKINEVIKQNGSRYYSFIYAYSNMYSREKRRIRLIPYRIVSDEYKMYNYLVCLSDEKSAGKEFK
ADSYRISRLSGLSIAEKLSQKEYSSVTEYERLKEGHVKSVKHLLSDPRFGSDESDISKVYLTEKGVEMFGKILYQRPILKGNEK
PKPNAVNEFISPPIQVKYYFNKFGKDGVILSPSDSFEEMRTLYVEGAEAYNREVEK (SEQ ID NO: 654)
>ODXC01000747_4
[human metagenome]
MSMTPSTFLPKREGGVPYIAEVQSIPLSPSAYSVIIKDKSIFETSLSPNGSVSMSSFLTRIFDSAYIASLKYKSEEYNGIPLLN
AFVQWQIEEIDDSLDDKSKEIIKSYLISKLSAKYEKTKTENAVRVRLSICRDLYDTLSSDDLYYENKVYSSTLRRFLKAVYEDY
ALLSDCERERLIFADNIIKINEVIKQNGSRYYSFIYAYSNMYSREKRRIRLIPYRIVSDEYKMYNYLVCLSDEKSAGKEFKADS
YRISRLSGLSIAEKLSQKEYSSVTEYERLKEVHVKSVKHLLSDPRFGSDESDISKVYLTEKGVEMFGKILYQRPILKGNEKPKP
NAVNEFISPPIQVKYYFNKFGKDGVILSPSDSFEEMRTLYVEGAEAYNREVEM (SEQ ID NO: 655)
>ODXO01005124_1
[human metagenome]
MSMTPSTFLPKREDGVPYIAEVQSIPLSPSAYSVIIRDKSIFETSLSPNGNVSMSSFLTSIFDSAYIASLKYKSDDNYKYIGIP
LLNAFVKWQIEEIDDDLDDKSKEIIKSYLISKLSAKYEKTKTENAVRVRLSICRDLYDTLSSDDLYYENKVYSSTLRRFLKAVY
EDYALLSDCERERLIFADNIIKINEVIKQNGSRYYSFIYAYSNMYSREKRRIRLIPYRIVSDEYKMYNYLVCLSDEKSAGKEFK
ADSYRISRLSGLSIAEKLSQKEYSSVTEYERLKEGHVKSVKHLLSDPRFGSDESDISKVYLTEKGVEMFGKILYQRPILKGNEK
PKPNAVNEFISPPIQVKYYFNKFGKDGVILSPSDSFEEMRTLYVEGAEAYNREVEM (SEQ ID NO: 656)
>ODYC01000377_17
[human metagenome]
MLIPPSTFLPKREDGVPYIAEVQSIPLSPSAYSVIIKDKSIFETSLSPNGSVSMSSFLTSIFDSAYIASLKYKSDDNYKYIGIP
LLNAFVEWQIEEIDDSLDDKSKEIIKSYLISKLSAKHEKTKTENAVRVRLSICRDLYDTLSSDDLYYENKVYSSTLRRFLKAVY
EDYALLSDCERERLIFADNIIKINEIIKQNGSRYYSFIYAYSNMYSREKRRIRLIPYRIVSDEYKMYNYLVCLSDEKSAGKEFK
ADSYRISRLSGLSIAEKLSQKEYSSVTEYERLKEGHVKSVKHLLSDPRFGSDESDISKVYLTEKGVEMFGKILYQRPILKGNEK
PKPNAVNEFISPPIQVKYYFNKFGKDGVILSPSDSFEEMRTLYVEGAEAYNREVEM (SEQ ID NO: 657)
>OEJW01000623_13
[human metagenome]
MLIPPSTFLPKREGGVPYIAEVQSIPLSPSAYSVIIKDKSIFETSLSPNGSVSMSSFLTSIFDSAYIASLKYKSDDNYKYNGIP
LLNAFVEWQIEEIDDGLDDKSKEIIKSYLISKLSAKYEKTKTENAVRVRLSICRDLYDTLSSDDLYYENKVYSSTLRRFLKAVY
EDYALLSDCERERLIFADNIIKINEVIKQNGSRYYSFIYAYSNMYSREKRRIRLIPYRIVSDEYKMYNYLVCLSDEKSAGKEFK
ADSYRISRLSGLSIAEKLSQKEYSSVTEYERLKEGHVKSVKHLLSDPRFGSDESDISKVYLTEKGVEMFGKILYQRPILKGNEK
PKPNAVNEFISPPIQVKYYFNKFGKDGVILSPSDSFEEMRTLYVEGAEAYNREVEI (SEQ ID NO: 658)
>OGHW01002048_2
[metagenome]
MLIPPSTFLPKREGGVPYIAEVQSIPLSPSAYSVIIKDKSIFETSLSPNGSVSMSSFLTSIFDSAYIASLKYKSDDNYKYIGIP
LLNAFVKWQIEEIDDGLDDKSKDIIKSYLISKLSAKYEKTKTENAVRVRLSICRDLYDTLSSDDLYYENKVYSSTLRRFLKAVY
EDYALLSDCERERLLFADNIIKINEVIKQNGSRYYSFIYAYSNMYSREKRRIRLIPYRIVSDEYKMYNYLVCLSDEKSAGKEFK
ADSYRISRLSGLSIAEKLSQKEYSSVTEYERLKEGHVKSVKHLLSDPRFGSDESDISKVYLTEKGVEMFGKILYQRPILKGNEK
PKPNAVNEFISPPIQVKYYFNKFGKDGVIISPSDSFEEMRTLYVKGAEAYNREVEM (SEQ ID NO: 659)
>OGIE01002059_22
[metagenome]
MSMTPSTFLPKREKNATYIAEVQSIPLSPAAYSVIIKDKSIFETSLSPNGSVSMSSFLTSIFDSAYIASLKYKSDDNYKYNGIP
LLNAFVKWQIEEIDDGLDDKSKEIIKSYLISKLSAKYEKTKTENAVRVRLSICRDLYDTLSSDDLYYENKVYSSTLRRFLKAVY
EDYALLSDCERERLLFADNIIKINEVIKQNGSRYYSFIYAYSNMYSREKHRIRLIPYRIVSDEYKMYNYLVCLSDEKSAGKEFK
ADSYRISRLSRLSIAEKLSQKEYSSVTEYERLKEGHVKSVKHLLSDPRFGSDESDISKVYLTEKGVEMFGKILYQRPILKGNER
PKHNAVNEFISPPIQVKYYFNKFGKDGVILSPSDSFEEMRTLYVEGAEAYNRVVEK (SEQ ID NO: 660)
>OGJI01000038_150
[metagenome]
MSMIPSTFLPKREGGVPYIAEVQSIPLSPSAYSVIIKDKSIFETSLSPYGSVSMSSFLTSIFDSAYIASLKYKSDDNYKYIGIP
LLNAFVKWQIEEIDDGLDDKSKEIIKSYLISKLSAKYEKTKTENAVRVRLSICRDLYDTLSSDDLYYENKVYSSTLRRFLKAVY
EDYALLSDCERERLLFADNIIKINEVIKQNGSRYYSFIYAYSNMYSREKRRIRLIPYRIVSDEYKMYNYLVCLSDEKSAGKEFK
ADSCRISRLSGLSIAEKLSQKEYSSVTEYERLKEGHVKSVKHLLSDPRFGSDESDISKVYLTEKGVEMFGKILYQRPILKGNEK
PKPNAVNEFISPPIQVKYYFNKFGKDGVILSPSDSFDEMRTLYVEGAEAYNREVEM (SEQ ID NO: 661)
>OGJY01000516_19
[metagenome]
MLIPPSTFLPKREGGVPYIAEVQSIPLSPSAYSVIIKDKSIFETSLSPNGSVSMSSFLTSIFDSAYIASLKYKSDDNYKYIGIP
LLNAFVEWQIEEIDDGLDDKSKEIIKGYLISKLSAKYEKTKTENAVRVRLSICRDLYDTLSSDDLYYENKVYSSTLRRFLKAVY
EDYALLSDCERERLIFADNIIKINEVIKQNGSRYYSFIYAYSNMYSREKRRIRLIPYRIVSDEYKMYNYLVCLSDEKSAGKEFK
ADSYRISRLSGLSIAEKLSQKEYSSVTKYERLKEVHVKSVKHLLSDPRFGSDESDISKVYLTEKGVEMFGKILYQRPILKGNEK
PKPNAVNEFISPPIQVKYYFNKFGKDGVIISPSDSFEEMRTLYVEGAEAYNREVEM (SEQ ID NO: 662)
>OGKA01000617_3
[metagenome]
MSMTPSTFLPKREGGVPYIAEVQSIPLSPSAYSVIIKDKSIFETSLSPNGSVSMSSFLTSIFDSAYIASLKYKSDDNYKYIGIP
LLNAFVKWQIEEIDDGLDDKSKEIIKSYLISKLSAKYEKTKTENAVRVRLSICRDLYDTLSSDDLYYENKVYSSTLRRFLKAVY
EDYALLSDCERERLLFADNIIKINEVIKQNGSRYYSFIYAYSNMYSREKRLIRLIPYRIVSDEYKMYNYLVCLSDEKSAGKEFK
ADSYRISRLSGLSIAEKLSQKEYFSVTEYERLKEGHVKSVKHLLSDPRFGSDESDISKVYLTEKGVEMFGKILYQRPILKGNEK
PKPNAVNEFISPPIQVKYYFNKFGKDGVILSPSDSFEEMRTLYVEGAEAYNREVEI (SEQ ID NO: 663)
>OGKE01000029_150
[metagenome]
MIPSTFLPKREGGVPYIAEVQSIPLSPSAYSVIIKDKSIFETSLSPYGSVSMSSFLTSIFDSAYIASLKYKSDDNYKYIGIPLL
NAFVKWQIEEIDDGLDDKSKEIIKSYLISKLSAKYEKTKTENAVRVRLSICRDLYDTLSSDDLYYENKVYSSTLRRFLKAVYED
YALLSDCERERLLFADNIIKINEVIKQNGSRYYSFIYAYSNMYSREKRRIRLIPYRIVSDEYKMYNYLVCLSDEKSAGKEFKAD
SCRISRLSGLSIAEKLSQKEYSSVTEYERLKEGHVKSVKHLLSDPRFGSDESDISKVYLTEKGVEMFGKILYQRPILKGNEKPK
PNAVNEFISPPIQVKYYFNKFGKDGVILSPSDSFDEMRTLYVEGAEAYNREVEM (SEQ ID NO: 664)
>OGLJ01000192_55
[metagenome]
MLIPPSTFLPKREGGVPYIAEVQSIPLSPSAYSVIIKDKSIFETSLSPNGSVSMSSFLTSIFDSAYIASLKYKSDDNYKYIGIP
LLNAFVKWQIEEIDDGLDDKSKEIIKSYLISKLSAKYEKTKTENAVRVRLSICRDLYDTLSSDDLYYENKVYSSTLRRFLKAVY
EDYALLSDCKRERLLFADNIIKINEVIKQNGSRYYSFIYAYSNMYSREKRRIRLIPYRIVSDEYKMYNYLVCLSDEKSSGKEFK
ADSYRISRLSGLSIAEKLSQKEYSSVTEYERLKEVHVKSVKHLLSDPRFGSDESDISKVYLTEKGVEMFGKILYQRPILKGNEK
PKPNAVNEFISPPIQVKYYFNKFGKDGVIISPSDSFEEMRTLYVEGAEAYNREVEM (SEQ ID NO: 665)
>OGMO01000062_68
[metagenome]
MSMTPSTFLPKREGGVPYIAEVQSIPLSPSAYSVIIKDKSIFETSLSPNGSVSMSSFLTSIFDSAYIASLKYKSEKYNGIPLLN
AFVKWQIEEIDDGLDDKSKEIIKSYLISKLSAKYEKTKTENAVRVRLSICRDLYDTLSSDDLYYENKVYSSTLRRFLKAVYEDY
ALLSDCERERLIFADNIIKINEVIKQNGSRYYSFIYAYSNMYSREKRRIRLIPYRIVSDEYKMYNYLVCLSDEKSAGKEFKADS
CRISRLSGLSIAEKLSQKEYSSVTEYERLKEGHVKSVKHLLSDPRFGSDESDISKVYLTEKGVEMFGKILYQRPILKGNEKPKP
NAVNEFISPPIQVKYYFNKFGKDGVILSPSDSFEEMRTLYVEGAEAYNREVEM (SEQ ID NO: 666)
>OGMP01001167_14
[metagenome]
MSMAPSTFLPKREDGVPYIAEVQSIPLSPSAYSVIIKDKSIFETSLSPNGSVSMSSFLTSIFDSAYIASLKYKSDDNYKYIGIP
LLNAFVKWQIEEIDDGLDDKSKEIIKSYLISKLSAKYEKTKTENAVRVRLSICRDLYDTLSSDDLYYENKVYSSTLRRFLKAVY
EDYALLSDCKRERLLFADNIIKINEVIKQNGSRYYSFIYAYSNMYSREKRRIRLIPYRIVSDEYKMYNYLVCLSDEKSSGKEFK
ADSYRISRLSGLSIAEKLSQKEYSSVTEYERLKEGHVKSVKHLLSDPRFGSDESDISKVYLTEKGVEMFGKILYQRPILKGNEK
PKPNAVNEFISPPIQVKYYFNKFGKDGVIISPSDSFEEMRTLYVEGAEAYNREVEM (SEQ ID NO: 667)

TABLE 5
Amino Acid Sequences of Cas13d Accessory Proteins WYL-bl

>DBYI01000091_50
[Ruminococcus flavefaciens]
MENKGKQREFIKDYNKIVPFLEKVFYYGTFSSEDYEKMDMMKKSKYSDYKRILEFAFRDVLYEKKNINGKKALGLRIDHFYDPH
RAFLRFFTLKSFVSIERLFLTCYILKRISKKGKCTINDICIGLDEVSVDDEVKDRKSTISRIIKNMVDYGFLIKKGSAYSINTG
AKTLNNVALLNLIDICTNAYPISICGSCIQNKIDQNYQSPFLIKHLHLGQIFNDELIWKLLIYANEKKQLCIELKKGIKLRELL
PYRIITNRETGRQYLFAIYVGTNNFDEYLMLRLDKISDIKIEASECEIPDDTVLKEKYDTAFRYSFNGTTFLKRDQQPESGILV
YDKSFEWNIKKHFPYSDAVSVDEKHNKVSIKVNTLTELKPWLRRNYDKVSLVESSDDTVDKMCDELKKWRKMYGII (SEQ ID
NO: 89)
>SFX39521.1
[Ruminococcus flavefaciens]
MANEEKNRSFFKITTYENFRRFLKTNFYYCSLSQGQQGMFIKSIGTTKYNEYKNIIELIAGGKIEFPKINKRLAFRYNISQLES
DYNELANSFQLRTLTSLDACLTLYILLFLSDKEMGSSDIYNRIGDIDFDIDEKTIRGKLKNMCEYGMISYKNKKYSLNECSLYS
VDTSIMLSLLNMADFMKNLVYPEVLGYDLFAALKKIYEERTGNEYISPFQFKYSHLANILDDNVLWTLIEAIDNRQHVAFEYGG
KIKERLIPVKIFTENEYNRCYLFAVKRFRNKLKFFVFRLSKIYNLKITNSDEDITEADFKEYSELYDSEKKCSFFGKIDSSAQN
DTVELKYKRGIRSQLERDFSCIEFRKNYTAIVTVKSKKMMIPYLRANMGLIRTTDDELSGILNEDIEEMKKNYGII (SEQ ID
NO: 90)
>3300018494|Ga0187911_10005861_21
[mammals-digestive system-feces]
MNVIIKQGDIFMGNEERNRSFFKEDTYETFRKFLKTNFYYCTLSQKQQSEYVKYIGTTQYNHYRGIIERISEGKISFKKYNKKK
AFKYDVSQFASDYNVLANSFQLKTITASQTCLTIYILCVLAKSSLTRKGIVAAIADGIDEKTIVSRIKSMKEAGLISYDGEKYF
IEESIFYSMDESLLLRLLNMVDFMKNLVYPEALGYNLFDIIKKIYDDRLCVDYYSPFQLKYSHLANILDDNVLWSLIEAIEERQ
YISFIYKNEKKERIIPVKLFTENEYARRYLFAVKKFGNNYKKFIFRLSEIYNIKVMEKEVSVSKEEFGKLLEMYETESGYSFSG
KIAPSSKTVSIKLRYKGRLKNQIERDFSNVKFEKGNTAEILIKNKKMIIPYLRSNMQLIQSTDEELSQKINSEIMEMKKLYGII
(SEQ ID NO: 91)
>DBYI01000091_49
[Ruminococcus flavefaciens]
MQSAWGILSLYGRYGIIIVIRGCDMENKGKQREFIKDYNKIVPFLEKVFYYGTFSSEDYEKMDMMKKSKYSDYKRILEFAFRDV
LYEKKNINGKKALGLRIDHFYDPHRAFLRFFTLKSFVSIERLFLTCYILKRISKKGKCTINDICIGLDEVSVDDEVKDRKSTIS
RIIKNMVDYGFLIKKGSAYSINTGAKTLNNVALLNLIDICTNAYPISICGSCIQNKIDQNYQSPFLIKHLHLGQIFNDELIWKL
LIYANEKKQLCIELKKGIKLRELLPYRIITNRETGRQYLFAIYVGTNNFDEYLMLRLDKISDIKIEASECEIPDDTVLKEKYDT
AFRYSFNGTTFLKRDQQPESGILVYDKSFEWNIKKHFPYSDAVSVDEKHNKVSIKVNTLTELKPWLRRNYDKVSLVESSDDTVD
KMCDELKKWRKMYGII (SEQ ID NO: 668)
>3300018494|Ga0187911_10019634_8
[mammals-digestive system-feces]
MSADLGRNKLLLNENTLKIAKGAFYYGCFTVKHFEEQGISKSTYNRCKDFLLHVFQDRIEEINVPHSRTRMLRLKNDQFEDACN
LLLDLFTYQPASSIEIVTFLSVLRVFTVAAPETSYTFENINKPISHICEDRRTFKKKLHTLVDRGYLLCERRDKRSFQYRLAPV
IFDRLDEFALYRLNALVDLCKCIYHPATCGRYLLDTLAFFNQQKSVNDETIFFCKHMHMGQVFDDAVLWKLMTAIYEKKIISFT
VNGKSYRFQQPCRIIINESDGRRYLYSIGLNTYTKNGKMHRIDQISGIKEEKHTDEISVFSSEEADRRYHNSTQGSFNGISMPR
KKRETAVLVYKKESYPEIQRHFPDAVPEVYDDDHDQVQITVNSLKDIKPWLRLHLGEIRLQSTSNDVKDEFEKEMAEWRAMYGI
V (SEQ ID NO: 669)

TABLE 6
Amino Acid Sequences of Cas13d Accessory Proteins WYL-b2

>SFX39545.1
[Ruminococcus flavefaciens]
MELFNEYRNKSLRAFLKLAERISYGEELSIDEFEAEYYRLSGDNKKITSVFYKNTLYNDKLPIFDTREGKVRLFGEPDKCSNKH
ISDTLLKSEITWLHNALNDKLSKLFLSDEERISIDAKLSDYTEYYKNIDDMWRSNEDISEEVEKNFKIILKAINEKQALSYTFK
NKNCEGFPVRIEYDERTCRIYMIIYDGNRFVKSDISKLSDIYITENSIDTIPEIKDDMLNKKAYLPVVFTVTDDKNRKAIDRAL
LAFSVYDHVVEPIDEKTARFTIQYYTMDLDLLIKDILAFGSDIKVESPRYVVKRITDILRKV (SEQ ID NO: 92)
>3300018494|Ga0187911_10005861_20
[mammals-digestive system-feces]
MELFNEFRNKSFNAFITLAERIANDNAVFSKTEFETEYYRLSGDENRITSIFYNNVINNEKYQIFTIPKDSKDKVQLSIEFDNK
DDINIANIPITSEKKWLHSALHDKLSKLFLSDEEISYIDETISEFPLYYEHIDDSWRKGENISEESVINFRIILQAINEKKSLS
YKYNGKDSEGSPVKIEYDERTCKIYMILYNGSRFIKSDISGLSDICIKEQLYEKIPDIKEGMLEKKARHPIVFTVTDNKNRKSI
ERALLAFSVYEHYVEPIDKNTAKFTIHYYTMDLDILIKDILAFGADIKVEAPQFVVKKIINILENV (SEQ ID NO: 93)
>DBYI01000091_51
[Ruminococcus flavefaciens]
MELSKLELINVYNNCYFISLVNVLNSLTDGEKLDKYKLNNRIANVVNDSQGYFSGKIADEVFDKCSLLFDITPDKTFISRNKVP
IPTCFTVIERIYIKSLINSKYGKLFLSPKEAEEIISCLGDVPDVPINDYLISLPSRTYDYSDKYINNVRFLLMAIKENKEIIYS
NKTKEIVHKNKHGYPIRIEYSALYDLFQLSLWSSEGNRPVKINLHSIYGINLTGNVWGEKKSPIEMMETKRCQEPIVIEISNDN
NTLERANILFSMYNTETEKLKNGTYRKKLYYYYFDENEIVNSIFSFGPYVKVISPTVIVDKIKEKIISLSSISNIL (SEQ ID
NO: 670)
>ODAI011611274_5
[gut metagenome]
MKLFHKYYSRKLLFAIEVLDALQGAKEQTLNWGELTRLSNRLGMTADLRAEVLNVLTEESRIVRVEDTSNYRLDTSWTTTTPKL
PTSKIEEDYLQMILRLPQAEQFLSRELRDRLTDPQASILNTDAIQTIEPNGEQTQLKLSQPEFRMILDAIEMGCAIRYRYISEQ
GKAAMEKHAVPWRLQYSAFDNRWWIILYTLKDHRCVKIALGSISDVQLEKHIQVKEADILKAREKDLAAEPAILQVKNTKNALE
RCFFVMDRQQFEDSELLEDGSAKLTYRYYHFETSDLLRRLLYLGPAVALIGPPKLRKALLEHVERALNHFRAEA (SEQ ID
NO: 671)

TABLE 7
Amino acid Sequences of Motifs in
Type VI-D CRISPR-Cas Effector Proteins

>MOTIF_1
RXXXXH (SEQ ID NO: 94)
>MOTIF_2
DXXXXQXXXXJLDXXK (SEQ ID NO: 95)
>MOTIF_3
FXXXXXXXXXGXXXXXJR (SEQ ID NO: 96)
>MOTIF_4
KEXNXXXXXXXXXXXNI (SEQ ID NO: 97)
>MOTIF_5
YXXXRXKBLXXXXLF (SEQ ID NO: 98)
>MOTIF_6
DXXXXQXXXXXXDIXK (SEQ ID NO: 672)
>MOTIF_7
KXXKNXGXXXXXLRE (SEQ ID NO: 673)

### REFERENCES

[0398] Altschul, S. F., Madden, T. L., Schaffer, A. A., Zhang, J., Zhang, Z., Miller, W., and Lipman, D. J. (1997). Gapped BLAST and PSI-BLAST: a new generation of protein database search programs. Nucleic Acids Res. 25, 3389-3402.
[0399] Bateman, A., Martin, M. J., O'Donovan, C., Magrane, M., Alpi, E., Antunes, R., Bely, B., Bingley, M., Bonilla, C., Britto, R., et al. (2017). UniProt: the universal protein knowledgebase. Nucleic Acids Res. 45, D158-D169.
[0400] Benson, D. A., Cavanaugh, M., Clark, K., Karsch-Mizrachi, I., Lipman, D. J., Ostell, J., and Sayers, E. W. (2013). GenBank. Nucleic Acids Res. 41, D36-42.
[0401] Eddy, S. R. (2011). Accelerated Profile HMM Searches. PLoS Comput. Biol. 7, e1002195.
[0402] Edgar, R. C. (2004). MUSCLE: multiple sequence alignment with high accuracy and high throughput. Nucleic Acids Res. 32, 1792-1797.
[0403] Edgar, R. C. (2010). Search and clustering orders of magnitude faster than BLAST. Bioinformatics 26, 2460-2461.
[0404] Finn, R. D., Bateman, A., Clements, J., Coggill, P., Eberhardt, R. Y., Eddy, S. R., Heger, A., Hetherington, K., Holm, L., Mistry, J., et al. (2014). Pfam: the protein families database. Nucleic Acids Res. 42, D222-D230.
[0405] Hein, S., Scholz, I., VoB, B., and Hess, W. R. (2013). Adaptation and modification of three CRISPR loci in two closely related cyanobacteria. RNA Biol. 10, 852-864.
[0406] Hyatt, D., Chen, G.-L., LoCascio, P. F., Land, M. L., Larimer, F. W., and Hauser, L. J. (2010). Prodigal: prokaryotic gene recognition and translation initiation site identification. BMC Bioinformatics 11, 119.
[0407] Makarova, K. S., Anantharaman, V., Grishin, N. V., Koonin, E. V., and Aravind, L. (2014). CARF and WYL domains: ligand-binding regulators of prokaryotic defense systems. Front. Genet. 5.
[0408] Peters, J. E., Makarova, K. S., Shmakov, S., and Koonin, E. V. (2017). Recruitment of CRISPR-Cas systems by Tn7-like transposons. Proc. Natl. Acad. Sci. U.S.A 114, E7358-E7366.
[0409] Pruitt, K. D., Tatusova, T., Brown, G. R., and Maglott, D. R. (2012). NCBI Reference Sequences (RefSeq): current status, new features and genome annotation policy. Nucleic Acids Res. 40, D130-135.
[0410] Shmakov, S., Abudayyeh, O. O., Makarova, K. S., Wolf, Y. I., Gootenberg, J. S., Semenova, E., Minakhin, L., Joung, J., Konermann, S., Severinov, K., et al. (2015). Discovery and Functional Characterization of Diverse Class 2 CRISPR-Cas Systems. Mol. Cell 60, 385-397.
[0411] Shmakov, S., Smargon, A., Scott, D., Cox, D., Pyzocha, N., Yan, W., Abudayyeh, O. O., Gootenberg, J. S., Makarova, K. S., Wolf, Y. I., et al. (2017). Diversity and evolution of class 2 CRISPR-Cas systems. Nat. Rev. Microbiol. 15, 169-182.
[0412] Smargon, A. A., Cox, D. B. T., Pyzocha, N. K., Zheng, K., Slaymaker, I. M., Gootenberg, J. S., Abudayyeh, O. A., Essletzbichler, P., Shmakov, S., Makarova, K. S., et al. (2017). Cas13b Is a Type VI-B CRISPR-Associated RNA-Guided RNase Differentially Regulated by Accessory Proteins Csx27 and Csx28. Mol. Cell 65, 618-630.e7.
[0413] Steinegger, M., and Söding, J. (2017). MMseqs2 enables sensitive protein sequence searching for the analysis of massive data sets.
[0414] Yu, J., Picord, G., Tuffery, P., and Guerois, R. (2015). HHalign-Kbest: exploring sub-optimal alignments for remote homology comparative modeling. Bioinforma. Oxf. Engl. 31, 3850-3852.
[0415] Zhu, W., Lomsadze, A., and Borodovsky, M. (2010). Ab initio gene identification in metagenomic sequences. Nucleic Acids Res. 38, e132-e132.

### Example 2. Accelerated In Vivo Functional Screening of Type VI-D CRISPR-Cas Systems

[0416] Having identified the minimal suite of Type VI-D CRISPR-Cas system components, we selected two loci for functional validation, those from Eubacterium siraeum DSM 15702 (EsCas13d) and Ruminococcus sp. N15. MGS-57 (RspCas13d). RspCas13d is a member of the largest subgroup of Cas13d proteins which contains 13 of the 31 unique members of the family and shows co-conservation with a putative WYL1 accessory protein (FIGS. 1, 6, 7). In contrast, there are no WYL-domain proteins (or other putative accessory proteins) encoded within 3 kb of the EsCas13d effector.

### DNA Synthesis and Effector Library Cloning

[0417] To test the activity of Type VI-D CRISPR-Cas, we designed and synthesized minimal systems containing RspCas13d or EsCas13d into the pET28a(+) vector. The synthesized Ruminococcus sp. RspCas13d system included RspCas13d and RspWYL1, codon optimized for E. coli expression under the control of a lac promoter and separated by an E. coli ribosome binding sequence (FIG. 8). Following the open reading frames for RspCas13d and RspWYL1, we included an acceptor site for a CRISPR array library driven by a J23119 promoter. The Eubacterium siraeum system was prepared similarly but included no gene for a WYL-domain containing protein.

[0418] The E. coli codon-optimized genes representing the minimal CRISPR effectors and accessory proteins were synthesized (Genscript) into a custom expression system derived from the pET-28a(+) (EMD-Millipore). Briefly, the Ruminococcus sp. synthesis product included Cas13d and WYL1 codon optimized for E. coli expression under the control of a Lac promoter and separated by an E. coli ribosome binding sequence. Following the open reading frames for Cas13d and WYL1, we included an acceptor site for a CRISPR array library driven by a J23119 promoter (Registry of Standard Biological Parts: parts.igem.org/Part:BBa_J23119). Our Eubacterium siraeum system was similarly constructed, but with only the effector protein.

[0419] In tandem with the effector gene synthesis, we first computationally designed an oligonucleotide library synthesis (OLS) pool containing “repeat-spacer-repeat” sequences, where “repeat” represents the consensus direct repeat sequence found in the CRISPR array associated with the effector, and “spacer” represents sequences tiling the pACYC184 plasmid. The spacer length was determined by the mode of the spacer lengths found in the endogenous CRISPR array. The repeat-spacer-repeat sequence was appended with restriction sites enabling the bi-directional cloning of the fragment into the aforementioned CRISPR array library acceptor site, as well as unique PCR priming sites to enable specific amplification of a specific repeat-spacer-repeat library from a larger pool. The library synthesis was performed by Agilent Genomics.

[0420] We next cloned the repeat-spacer-repeat library into the plasmid containing the minimal engineered locus using the Golden Gate assembly method. In brief, we first amplified each repeat-spacer-repeat from the OLS pool (Agilent Genomics) using unique PCR primers, and pre-linearized the plasmid backbone using BsaI to reduce potential background. Both DNA fragments were purified with Ampure XP (Beckman Coulter) prior to addition to Golden Gate Assembly Master Mix (New England Biolabs) and incubated as per manufacturer's instructions. We further purified and concentrated the Golden Gate reaction to enable maximum transformation efficiency in the subsequent steps of the bacterial screen.

### Accelerated Functional Screening for Cas13d

[0421] To accelerate functional screening of Type VI-D systems, we developed a strategy to derive the following functional information in a single screen: 1) crRNA expression direction and processing, 2) nucleic acid substrate type, and 3) targeting requirements such as protospacer adjacent motif (PAM), protospacer flanking sequence (PFS), or target secondary structure. We designed minimal CRISPR array libraries consisting of two consensus direct repeats, each flanking a unique natural-length spacer sequence targeting either the pACYC184 vector or an absent GFP sequence as a negative control. The CRISPR array libraries for EsCas13d and RspCas13d systems consisted of 4549 and 3972 pACYC184-targeting spacers respectively, in addition to 452 and 450 spacers targeting the GFP negative control sequence, respectively. We also designed a bidirectional array library cloning strategy to test both possible CRISPR array expression directions in parallel.

[0422] The CRISPR array libraries for RspCas13d and EsCas13d were cloned into acceptor sites on respective Type VI-D expression plasmids such that each plasmid contained a single library element and orientation (FIG. 8). The resulting plasmid libraries were transformed with pACYC184 into Stbl3 E. coli using electroporation, yielding a maximum of one plasmid library element per cell. Transformed E. coli cells were plated on bioassay plates containing Kanamycin (selecting for the library plasmid), Chloramphenicol (CAM; selecting for intact pACYC184 CAM expression), and Tetracycline (TET; selecting for intact pACYC184 TET expression), such that interruption of pACYC184 plasmid DNA or antibiotic resistance gene expression by the CRISPR-Cas system results in bacterial cell death. Screens were harvested 12 h after plating, and plasmid DNA was extracted (FIG. 9). We PCR amplified the CRISPR array region of the input plasmid library prior to transformation and the output plasmid library after bacterial selection on antibiotic plates.

[0423] The plasmid library containing the distinct repeat-spacer-repeat elements and Cas proteins was electroporated into Endura electrocompetent E. coli (Lucigen) using a Gene Pulser Xcell® (Bio-rad) following the protocol recommended by Lucigen. The library was either co-transformed with purified pACYC184 plasmid, or directly transformed into pACYC184-containing Endura electrocompetent E. coli (Lucigen), plated onto agar containing Chloramphenicol® (Fisher), Tetracycline (Alfa Aesar), and Kanamycin (Alfa Aesar) in BioAssay® dishes (Thermo Fisher), and incubated for 10-12 h. After estimation of approximate colony count to ensure sufficient library representation on the bacterial plate, the bacteria were harvested and DNA plasmid extracted using a QIAprep Spin Miniprep® Kit (Qiagen) to create the “output library.” By performing a PCR using custom primers containing barcodes and sites compatible with Illumina sequencing chemistry, we generated a barcoded next generation sequencing library from both the pre-transformation “input library” and the post-harvest “output library,” which were then pooled and loaded onto a Nextseq 550 (Illumina) to evaluate the effectors. At least two independent biological replicates were performed for each screen to ensure consistency.

### Bacterial Screen Sequencing Analysis

[0424] Next generation sequencing data for screen input and output libraries were demultiplexed using Illumina bcl2fastq. Reads in resulting fastq files for each sample contained the CRISPR array elements for the screening plasmid library. The direct repeat sequence of the CRISPR array was used to determine the array orientation, and the spacer sequence was mapped to the source plasmid pACYC184 or negative control sequence (GFP) to determine the corresponding target. For each sample, the total number of reads for each unique array element (rₐ) in a given plasmid library was counted and normalized as follows: (rₐ+1)/total reads for all library array elements. The depletion score was calculated by dividing normalized output reads for a given array element by normalized input reads.

[0425] To identify specific parameters resulting in enzymatic activity and bacterial cell death, we used next generation sequencing (NGS) to quantify and compare the representation of individual CRISPR arrays (i.e., repeat-spacer-repeat) in the PCR of the input and output plasmid libraries. We defined the array depletion ratio as the normalized output read count divided by the normalized input read count. An array was considered to be strongly depleted if the depletion ratio was less than 0.1 (more than 10-fold depletion). When calculating the array depletion ratio across biological replicates, we took the maximum depletion ratio value for a given CRISPR array across all experiments (i.e. a strongly depleted array must be strongly depleted in all biological replicates). We generated a matrix including array depletion ratios and the following features for each spacer target: target strand, transcript targeting, ORI targeting, target sequence motifs, flanking sequence motifs, and target secondary structure. We investigated the degree to which different features in this matrix explained target depletion for RspCas13d and EsCas13d systems, thereby yielding abroad survey of functional parameters within a single screen.

Distribution of Bacterial Screening Targets Indicates that Cas13d Targets ssRNA Transcripts

[0426] To identify the targeted substrate for Cas13d, we first identified a set of minimal CRISPR arrays that were strongly depleted in 2 screen biological replicates. For both RspCas13d and EsCas13d systems, these strongly depleted arrays primarily targeted pACYC184, with minimal depletion of the negative control (FIGS. 10 and 11). We observed 1119 and 806 strongly depleted arrays for the RspCas13d and EsCas13d systems, respectively (FIGS. 12A-B). The spatial distribution and strand preference of the strongly depleted target sites along pACYC184 (FIGS. 13A-B) indicate a preference for transcript targeting, suggesting that Cas13d targets single-stranded RNA transcripts. Additionally, the presence of strongly depleted targets within the non-coding region of pACYC184 between the Tet and CAM ORFs corresponds to the extension of RNA transcripts coding for these genes beyond the end of the open reading frame.

[0427] These results indicate that targeting of non-essential regions of transcripts might trigger additional catalytic activities of Cas13d enzymes resulting in toxicity and cell death

### Lack of PFS for Cas13d and a New Model for Analysis of Sequence Constraints

[0428] Previous RNA targeting CRISPR-Cas systems from subtypes VI-A-C have shown varying dependence on a protospacer flanking sequence (PFS) for efficient RNA targeting (Abudayyeh et al., 2016, 2017; Cox et al., 2017; East-Seletsky et al., 2016, 2017; Gootenberg et al., 2017; Smargon et al., 2017). Here we present evidence that RspCas13d and EsCas13d have no such flanking sequence requirements. For each enzyme, WebLogos® (Crooks et al., 2004) show that at each of 30 positions before and after the target sequences for strongly depleted arrays the nucleotide frequencies do not appreciably differ from a uniform distribution (FIGS. 14A-B).

[0429] To investigate possible flanking sequence requirements further, we developed a combinatorial model to search for up to 3 nucleotide locations distributed across the target or flanking sequences that might explain the observed strongly depleted arrays. We calculated a bit score to measure the degree to which the selected locations correspond to strongly biased outcomes (e.g. all hits or all non-hits). More specifically, we defined a targeting requirement to comprise a set of locations relative to a target sequence and the corresponding nucleotide sequences at those locations. For a given targeting requirement, we define the hit ratio (hr) as the ratio of the number of strongly depleted CRISPR arrays to the total number of library targets satisfying the requirement. When searching for a PAM or PFS of length k, we consider

$$( \begin{matrix}n \\ k\end{matrix} )$$

potential targeting requirement locations, where n=spacer length+2·flank length. The bit score for a potential targeting requirement is calculated as bitscore=Σ−hr log(hr) over all nucleotide sequences at the specified targeting requirement locations. For CRISPR-Cas systems with known PAM or PFS requirements, such as BzCas13b, high bit scores for targeting requirements of length 2 or 3 within 15 nt flanks of the target were obtained, and accurately recapitulate the location of the known PFS (FIG. 14C). Conversely, for RspCas13d and EsCas13d, our analysis shows no evidence of flanking or spacer sequences contributing to the targeting efficiency of strongly depleted arrays (FIG. 14C).

### Explaining Strongly Depleted Arrays for RspCas13d and EsCas13d

[0430] Cumulatively, transcript targeting explained 86% and 66% of the strongly depleted arrays for RspCas13d and EsCas13d, respectively (FIG. 15). Accordingly, little if any targeting was observed for the ORF template strand. Non-coding and origin of replication (ORI) targeting correspond to actively transcribed regions of the ORI and the extension of coding transcripts into the intergenic region, as corroborated by RNA sequencing of Stbl3 E. coli containing pACYC184 (FIGS. 14A-B). Secondary structure analysis of the transcripts further enhanced the explanation of targeting for Cas13d. We predicted RNA secondary structure (Lorenz et al., 2011) for all sub-sequences within 30 nt of transcript target sites, and found that sequences with no predicted stable secondary structure corresponded to a higher percentage of strongly depleted targets (FIGS. 16A-B). Accordingly, we selected several sub-sequence ranges around the target site (FIGS. 16A-B), and defined a minimal secondary structure targeting requirement to be satisfied if the target site exhibited no predicted stable secondary structure for any of the selected sequence ranges. Among the transcript target sites that satisfy the minimal secondary structure requirement, we can explain 93% and 84% of all strongly depleted arrays for RspCas13d and EsCas13d, respectively (FIG. 16C). Together, our results indicate that RspCas13d and EsCas13d are RNA-targeting effectors with no flanking sequence requirements and a preference for minimal secondary structure for RNA targeting in E. coli.

RNA-Sequencing Mature crRNA from In Vivo Bacterial Screen

[0431] Sequencing the small RNA from the in vivo bacterial screen began by extracting total RNA from harvested screen bacteria using the Direct-zol RNA MiniPrep® Plus w/TRI Reagent (Zymo Research). Ribosomal RNA was removed using a Ribo-Zero® rRNA Removal Kit for Bacteria, followed by cleanup using a RNA Clean and Concentrator-5 kit. The resultant ribosomal RNA depleted total RNA was treated with T4 PNK, RNA 5′ polyphosphatase, prepared for sequencing using the NEBNext® Small RNA Library Prep Set, and analyzed as described above.

[0432] We analyzed the pre-crRNA processing in the screen output samples for the direct repeat orientation that demonstrated successful targeting of pACYC184 and identified a mature 53 nt crRNA consisting of a 5′ direct repeat truncated by 6 nt (FIG. 17). The most common spacer length observed for EsCas13d was 23 nt, with length variation between 20 nt and 30 nt (length of the native spacer for EsCas13d).

### REFERENCES

[0433] Abudayyeh, O. O., Gootenberg, J. S., Konermann, S., Joung, J., Slaymaker, I. M., Cox, D. B. T., Shmakov, S., Makarova, K. S., Semenova, E., Minakhin, L., et al. (2016). C2c2 is a single-component programmable RNA-guided RNA-targeting CRISPR effector. Science 353, aaf5573.
[0434] Abudayyeh, O. O., Gootenberg, J. S., Essletzbichler, P., Han, S., Joung, J., Belanto, J. J., Verdine, V., Cox, D. B. T., Kellner, M. J., Regev, A., et al. (2017). RNA targeting with CRISPR-Cas13. Nature 550, 280-284.
[0435] Cox, D. B. T., Gootenberg, J. S., Abudayyeh, O. O., Franklin, B., Kellner, M. J., Joung, J., and Zhang, F. (2017). RNA editing with CRISPR-Cas13. Science 358, 1019-1027.
[0436] Crooks, G. E., Hon, G., Chandonia, J.-M., and Brenner, S. E. (2004). WebLogo: a sequence logo generator. Genome Res. 14, 1188-1190.
[0437] East-Seletsky, A., O'Connell, M. R., Knight, S. C., Burstein, D., Cate, J. H. D., Tjian, R., and Doudna, J. A. (2016). Two distinct RNase activities of CRISPR-C2c2 enable guide-RNA processing and RNA detection. Nature 538, 270-273.
[0438] East-Seletsky, A., O'Connell, M. R., Burstein, D., Knott, G. J., and Doudna, J. A. (2017). RNA Targeting by Functionally Orthogonal Type VI-A CRISPR-Cas Enzymes. Mol. Cell 66, 373-383.e3.
[0439] Gootenberg, J. S., Abudayyeh, O. O., Lee, J. W., Essletzbichler, P., Dy, A. J., Joung, J., Verdine, V., Donghia, N., Daringer, N. M., Freije, C. A., et al. (2017). Nucleic acid detection with CRISPR-Cas13a/C2c2. Science 356, 438-442.
[0440] Lorenz, R., Bernhart, S. H., Höner zu Siederdissen, C., Tafer, H., Flamm, C., Stadler, P. F., and Hofacker, I. L. (2011). ViennaRNA Package 2.0. Algorithms Mol. Biol. 6, 26.
[0441] Smargon, A. A., Cox, D. B. T., Pyzocha, N. K., Zheng, K., Slaymaker, I. M., Gootenberg, J. S., Abudayyeh, O. A., Essletzbichler, P., Shmakov, S., Makarova, K. S., et al. (2017). Cas13b Is a Type VI-B CRISPR-Associated RNA-Guided RNase Differentially Regulated by Accessory Proteins Csx27 and Csx28. Mol. Cell 65, 618-630.e7.

### Example 3. Validation of Type VI-D Effector Activity In Vitro (Biochemically)

### Effector and Accessory Protein Purification

[0442] The effector or accessory protein expression construct was transformed into an E. coli T7 expression strain, NiCo21(DE3)® (New England Biolabs). 1 mL of overnight culture was inoculated into 1 liter of Luria-Bertani broth growth media (10 g/L tryptone, 5 g/L yeast extract, 5 g/L NaCl, Sigma) supplemented with 50 μg/mL Kanamycin. Cells were grown at 37° C. to a cell density of 0.5-0.8 OD₆₀₀. Protein expression was then induced by supplementing with IPTG to a final concentration of 0.2 mM and the culture continued to grow for 14-18 hours at 20° C. The cells were harvested by centrifugation and cell paste was resuspended in 80 ml of freshly prepared Lysis Buffer (50 mM Hepes pH 7.6, 0.5M NaCl, 10 mM imidazole, 14 mM 2-mercaptoethanol and 5% glycerol) supplemented with protease inhibitors (cOmplete, EDTA-free, Roche Diagnostics Corporation). The resuspended cells were broken by passing through a cell disruptor (Constant System Limited). Lysate was cleared by centrifugation twice at 28,000 g for 30 min each. The clarified lysate was applied to a 5 ml HisTrap FF chromatography column (GE Life Sciences).

[0443] Protein purification was performed via FPLC (AKTA Pure, GE Healthcare Life Sciences). After washing with Lysis Buffer, protein was eluted with a gradient of 10 mM to 250 mM of imidazole. Fractions containing protein of the expected size were pooled, concentrated in Vivaspin 20 ultrafiltration unit (Sartorius) and either used directly for biochemical assays or frozen at −80° C. for storage. Protein purity was determined by SDS-PAGE analysis and protein concentration was determined by Qubit® protein assay kit (Thermo Fisher). FIG. 17 shows a Coomassie blue stained polyacrylamide gel of the purified recombinant proteins EsCas13d, RspCas13d, and RspWYL1 respectively.

crRNA and Substrate RNA Preparation

[0444] DNA oligo templates for crRNA and substrate RNA in vitro transcription were ordered from IDT (TABLES 8 and 9). Templates for crRNAs were annealed to a short T7 primer (final concentrations 4 M) and incubated with T7 RNA polymerase overnight at 37° C. using the HiScribe® T7 Quick High Yield RNA Synthesis kit (New England Biolabs). Annealing was performed by incubating T7 primer with templates for 2 minutes at 95° C. followed by a −5° C./s ramp down to 23° C. Templates for substrate RNA were PCR amplified to yield dsDNA and then incubated with T7 RNA polymerase at 37° C. overnight using the same T7 Quick High Yield RNA Synthesis kit. After in vitro transcription, samples were treated with DNase I (Zymo Research) and then purified using RNA Clean & Concentrator kit (Zymo Research).

[0445] 5′ end labeling was accomplished using the 5′ end labeling kit (VectorLabs) and with a IR800® dye-maleimide probe (LI-COR Biosciences). Body labeling of RNA was performed during in vitro transcription using the HiScribe® T7 Quick High Yield RNA Synthesis kit (New England Biolabs). The in vitro transcription reactions contained 2.5 mM Fluorescein-12-UTP (Sigma Aldrich). Labeled RNA was purified to remove excess dyes using RNA Clean & Concentrator kit (Zymo Research). The RNA concentration was measured on Nanodrop® 2000 (Thermo Fisher).

[0446] The effectors were then incubated with their respective in vitro transcribed pre-crRNAs consisting of a minimal CRISPR array with the repeat-spacer-repeat construction used in the bacterial screening library, but with a single spacer instead of a library. Pre-crRNA cleavage assays were performed at 37° C. in processing buffer (20 mM Tris pH8.0, 50 mM KCl, 1 mM EDTA, 10 mM MgCl2, and 100 ug/ml BSA) unless otherwise indicated, with a final reaction concentration of 200 nM of pre-crRNA and varying enzyme concentrations and EDTA as indicated. Reactions were incubated for 30 minutes, and quenched with the addition of 1 ug/uL of proteinase K (Ambion) incubated for 10 minutes at 37° C. Afterwards, 50 mM of EDTA was added to the reaction, which was then mixed with equal parts 2×TBE-Urea Sample Buffer (Invitrogen) prior to denaturing at 65 C for 3 minutes. Samples were analyzed by denaturing gel electrophoresis on 15% TBE-Urea gels (Invitrogen) and stained using SYBR Gold nucleic acid stain (Invitrogen) for 10-20 minutes prior to imaging on a Gel Doc EZ (Biorad). We found that EsCas13d and RspCas13d effectors process pre-crRNAs to form mature crRNAs in the absence of any accessory proteins (FIGS. 20A-D).

### RNA-Sequencing of In Vitro Cleaved Pre-crRNA

[0447] Sequencing of in vitro cleaved pre-crRNA began with performing and quenching the cleavage assays as described above. The reactions were then column purified using a RNA Clean and Concentrator-5 kit (Zymo Research). The RNA samples were then PNK treated for 3 hours without ATP to enrich for 3′-P ends, after which ATP was added and the reaction incubated for another hour to enrich for 5′-OH ends. The samples were then column purified, incubated with RNA 5′ polyphosphatase (Lucigen) and column purified again prior to preparation for next-generation sequencing using the NEBNext® Multiplex Small RNA Library Prep Set for Illumina (New England Biolabs). The library was paired-end sequenced on a Nextseq 550® (Illumina), and the resulting paired end alignments were analyzed using Geneious 11.0.2 (Biomatters).

[0448] Performing next-generation sequencing of the in vitro cleaved RNA fragments enabled the exact identification of the processing intermediates and mature crRNA (FIG. 19) visualized by denaturing gel. For both EsCas13d and RspCas13d, sequencing the mature crRNA corroborated the 6 nt truncation from the 5′ end of the first direct repeat found in the in vivo small RNA sequencing. For the 3′ end, 6 nt of the second direct repeat remained attached to the 3′ end of the spacer, yielding a total product of 66 nt consistent with the mature crRNA visualized by denaturing gel. The difference between the well-defined 3′ end of the mature crRNA forms observed in vitro versus the various lengths identified in vivo may be the result of further truncation in vivo by endogenous RNases following the initial pre-crRNA cleavage. The effector's ability to cleave pre-crRNA at the same location relative to the predicted stem loop structure of either direct repeat (FIG. 19 intermediates 1 and 2) indicates that the Type VI-D CRISPR-Cas effectors are able to process pre-crRNAs containing multiple DRs and spacers.

Effect of EDTA on crRNA Processing

[0449] We next examined the dependence of pre-crRNA cleavage on divalent metal ions. We observed that the generation of mature crRNA for both EsCas13d and RspCas13d is substantially inhibited by the addition of EDTA (FIGS. 20A-D), while Cas13a from Leptotrichia wadei (LwaCas13a) is still able to generate mature crRNAs in the presence of EDTA (FIG. 21). This dependence of Cas13d on divalent cations to generate mature crRNA is a notable functional distinction from Cas13a crRNA processing (East-Seletsky et al., 2016; Knott et al., 2017).

Validation of ssRNA Cleavage Activities

[0450] We next sought to biochemically validate the RNA-guided ssRNA cleavage activities of the Cas13d enzymes observed in our bacterial screens. Target cleavage assays were performed at 37° C. in cleavage buffer (20 mM HEPES pH 7.1, 50 mM KCl, 5 mM MgCl2 and 5% glycerol). Cas13-crRNA complex formation was performed in cleavage buffer by incubating a 2:1 molar ratio of protein to crRNA at 37° C. for 5 minutes, and RspWYL1 was added to the Cas13-crRNA pre-incubation according to the experimental conditions. For the cleavage reactions at different Cas13 concentrations, the pre-formed Cas13-crRNA complexes were diluted on ice, keeping the Cas13-crRNA ratio constant at 2:1. The 5′ IR800 labeled target ssRNA and/or additional unlabeled and fluorescent body-labeled ssRNAs were then added to the pre-formed complex and incubated at 37° C. for 30 minutes. The final concentration of short substrate RNAs was 100 nM and the fluorescent body-labeled ssRNA for collateral effect visualization was 50 nM, unless otherwise indicated. Reactions were quenched by adding 1 ug/uL of proteinase K (Ambion) and incubating for 10 minutes at 37° C.

[0451] Afterwards, 50 mM of EDTA was added to the reaction, which was then mixed with equal parts 2×TBE-Urea Sample Buffer (Invitrogen) prior to denaturing at 65° C. for 3 minutes. Samples were analyzed by denaturing gel electrophoresis on 6% or 15% TBE-Urea gels (Invitrogen). Fluorescence images were obtained using a Gel Doc EZ® (Biorad), and near-infrared images were obtained using an Odyssey® CLx scanner (LI-COR Biosciences). Afterwards, the gels were stained for 10-20 minutes using SYBR Gold nucleic acid stain (Invitrogen) and imaged on the Gel Doc EZ® to verify the results from the fluorescence and IR images.

[0452] We titrated Apo EsCas13d and RspCas13d (100-0.4 nM) over a non-targeted ssDNA substrate (100 nM), with the denaturing gel (FIGS. 22A-B) showing minimal cleavage products. We then titrated EsCas13d and RspCas13d in complex with crRNA (100-0.4 nM) over non-targeted ssDNA substrates (100 nM), with the resulting denaturing gel (FIGS. 23A-B) showing minimal cleavage products.

[0453] We identified spacer sequences for several strongly depleted arrays from bacterial screens for each CRISPR-Cas system and generated pre-crRNAs with the repeat-spacer-repeat arrangement for each effector. We then titrated EsCas13d and RspCas13d in complex with crRNA (100-0.4 nM) over targeted ssDNA substrates (100 nM), with the resulting denaturing gel (FIGS. 24A-B) showing saturation of target cleavage activity at approx. 50 nM RspCas13d-crRNA complex and 100 nM EsCas13d-crRNA complex. In an additional experiment, we targeted EsCas13d and RspCas13d enzyme-crRNA complexes to 130 nt ssRNA substrates containing target sequences complementary to the crRNA spacer and demonstrated targeted RNA cleavage activity for both enzymes (FIGS. 25A-B).

[0454] To evaluate the collateral RNA cleavage activity, identical reactions were prepared and supplemented with 800 nt fluorescent body-labeled ssRNA fragments that did not contain the target sequence. Both EsCas13d and RspCas13d showed substantial collateral activity that occurs with the target cleavage (FIGS. 26A-B). We further demonstrated that both EsCas13d and RspCas13d show robust sequence-specific targeted and collateral RNA cleavage activities across multiple crRNAs with and without complementary substrates (FIGS. 26C-D).

TABLE 8
ssRNA Oligos Used in This Study

| ID | Type | Source | Description | Sequence | FIGS. |
|---|---|---|---|---|---|
| cr_F1 | ssRNA | IDT IVT | EsCas13d pre-crRNA #1 | GAACUACACCCGUGCAAAAUUGCAGGGGUCUAAAACUCAUCCGCUUA | 20A-B, 23A, |
| | | | | UUAUCACUUAUUCAGGCGUGAACUACACCCGUGCAAAAUUGCAGGGG | 24A, 25A, |
| | | | | UCUAAAAC (SEQ ID NO: 99) | 26A, 26C, |
| | | | | | 30A-B |
| cr_F4 | ssRNA | IDT IVT | EsCas13d pre-crRNA #2 | GAACUACACCCGUGCAAAAUUGCAGGGGUCUAAAACAUAGGUACAUU | 20B, 26C |
| | | | | GAGCAACUGACUGAAAUGCGAACUACACCCGUGCAAAAUUGCAGGGG | |
| | | | | UCUAAAAC (SEQ ID NO: 100) | |
| cr_F7 | ssRNA | IDT IVT | RspCas13d pre-crRNA #1 | CUACUACACUGGUGCAAAUUUGCACUAGUCUAAAACCAAGGGUGAAC | 20C-D, 23B, |
| | | | | ACUAUCCCAUAUCACCAGCUCUACUACACUGGUGCGAAUUUGCACUA | 24B, 25B, |
| | | | | GUCUAAAAC (SEQ ID NO: 101) | 26B, 26D, |
| | | | | | 29A-C |
| cr_F10 | ssRNA | IDT IVT | RspCas13d pre-crRNA #2 | CUACUACACUGGUGCAAAUUUGCACUAGUCUAAAACCCUGUGGAACA | 20D, 26D |
| | | | | CCUACAUCUGUAUUAACGAACUACUACACUGGUGCGAAUUUGCACUA | |
| | | | | GUCUAAAAC (SEQ ID NO: 102) | |
| cr_3 | ssRNA | IDT IVT | LwaCas13a pre-crRNA #1 | GAUUUAGACUACCCCAAAAACGAAGGGGACUAAAACAUUUUUUUCUC | 21 |
| | | | | CAUUUUAGCUUCCUUAGGAUUUAGACUACCCCAAAAACGAAGGGGAC | |
| | | | | UAAAAC (SEQ ID NO: 103) | |
| cr_4 | ssRNA | IDT IVT | LwaCas13a pre-crRNA #2 | GAUUUAGACUACCCCAAAAACGAAGGGGACuAAAACAGAAUCAUAAU | 21 |
| | | | | GGGGAAGGCCAUCCAGCGAUUUAGACUACCCCAAAAACGAAGGGGAC | |
| | | | | UAAAAC (SEQ ID NO: 104) | |
| sub_F1 | ssRNA | PCR IVT | EsCas13d substrate #1; | AUACGCUGUGGUUCGCCAAGUCCCAAUGGCAUCGUAAAGAACAUUUU | 24A, 25A, |
| | | | “target ssRNA” in FIGs. | GAGGCAUUUCAGUCAGUUGCUCAAUGUACCUAUAACCAGACCGUUCA | 26A, 26C, |
| | | | 24, 25, 26, 30; “A” in | GCUGGAUAUUACGGCCAAGAGAGCACGAAAGUGUUG (SEQ ID | 30A-B |
| | | | FIG. 26C | NO: 105) | |
| sub_F4 | ssRNA | PCR IVT | EsCasnd substrate #2; | AUACGCUGUGGUUCGCCAAGAGUUAUUGGUGCCCUUAAACGCCUGGU | 22A, 23A, |
| | | | “non target ssRNA” in | GCUACGCCUGAAUAAGUGAUAAUAAGCGGAUGAAUGGCAGAAAUUCG | 25A, 26A, |
| | | | FIGs. 22, 23, 25, 26, | AAAGCAAAUUCGACCCAAGAGAGCACGAAAGUGUUG (SEQ ID | 26C, 30A-B |
| | | | 30; “B” in FIG. 26C | NO: 106) | |
| sub_F7 | ssRNA | PCR IVT | RspCas13d substrate #1; | AUACGCUGUGGUUCGCCAAGCGGAAUUCCGUAUGGCAAUGAAAGACG | 24B, 25B, |
| | | | “target ssRNA” in FIGs. | GUGAGCUGGUGAUAUGGGAUAGUGUUCACCCUUGUUACACCGUUUUC | 26B, 26B, |
| | | | 24, 25, 26, 29; “A” in | CAUGAGCAAACUGAAACAAGAGAGCACGAAAGUGUUG (SEQ ID | 26D, 29A-C |
| | | | FIG. 26D | NO: 107) | |
| sub_F10 | ssRNA | PCR IVT | RspCas13d substrate #2; | AUACGCUGUGGUUCGCCAAGCUCCCAGAGCCUGAUAAAAACGGUUAG | 22g, 23g, |
| | | | “non target ssRNA” in | CGCUUCGUUAAUACAGAUGUAGGUGUUCCACAGGGUAGCCAGCAGCA | 25B, 26B, |
| | | | FIGs. 22, 23, 25, 26, | UCCUGCGAUGCAGAUCCAAGAGAGCACGAAAGUGUUG (SEQ ID | 26D, 29A-C |
| | | | 29; “B” in FIG. 26D | NO: 108) | |
| GFP | ssRNA | PCR IVT | Collateral ssRNA; when | GGGAAUUGUGAGCGGAUAACAAUUCCCCUCUAGAAAUAAUUUUGUUU | 26A-D, |
| | | | IVT completed with | AACUUUAAGAAGGAGAUUUAAAUAUGAAAAUCGAAGAAGGUAAAGGU | 29B-C, 30B |
| | | | Fluorescein-12-UTP, | CACCAUCACCAUCACCACGGAUCCAUGACGGCAUUGACGGAAGGUGC | |
| | | | produces body labeled | AAAACUGUUUGAGAAAGAGAUCCCGUAUAUCACCGAACUGGAAGGCG | |
| | | | ssRNA | ACGUCGAAGGUAUGAAAUUUAUCAUUAAAGGCGAGGGUACCGGUGAC | |
| | | | | GCGACCACGGGUACCAUUAAAGCGAAAUACAUCUGCACUACGGGCGA | |
| | | | | CCUGCCGGUCCCGUGGGCAACCCUGGUGAGCACCCUGAGCUACGGUG | |
| | | | | UUCAGUGUUUCGCCAAGUACCCGAGCCACAUCAAGGAUUUCUUUAAG | |
| | | | | AGCGCCAUGCCGGAAGGUUAUACCCAAGAGCGUACCAUCAGCUUCGA | |
| | | | | AGGCGACGGCGUGUACAAGACGCGUGCUAUGGUUACCUACGAACGCG | |
| | | | | GUUCUAUCUACAAUCGUGUCACGCUGACUGGUGAGAACUUUAAGAAA | |
| | | | | GACGGUCACAUUCUGCGUAAGAACGUUGCAUUCCAAUGCCCGCCAAG | |
| | | | | CAUUCUGUAUAUUCUGCCUGACACCGUUAACAAUGGCAUCCGCGUUG | |
| | | | | AGUUCAACCAGGCGUACGAUAUUGAAGGUGUGACCGAAAAACUGGUU | |
| | | | | ACCAAAUGCAGCCAAAUGAAUCGUCCGUUGGCGGGCUCCGCGGCAGU | |
| | | | | GCAUAUCCCGCGUUAUCAUCACAUUACCUACCACACCAAACUGAGCA | |
| | | | | AAGACCGCGACGAGCGCCGUGAUCACAUGUGUCUGGUAGAGGUCGUG | |
| | | | | AAAGCGGUUGAUCUGGACACGUAUCAGUAAUAAAAAGCCCGAAAGGA | |
| | | | | AGCUGAGUUGGCUGCUGCCACCGCUGAGCAAUAA (SEQ ID NO: | |
| | | | | 109) | |

TABLE 9
ssDNA Primers Used to Generate the ssRNA Targets Using in Vitro Transcription

| ID | Type | Source | Description | Sequence |
|---|---|---|---|---|
| T7_primer | ssDNA | IDT | annealing to | CCTCGAGTAATACGACTCACTATAGGG (SEQ ID NO: 110) |
| | | | different IVT rev | |
| | | | primers to create | |
| | | | double-stranded T7 | |
| | | | promoter region | |
| | | | for IVT | |
| cr_F1_IVT_rev | ssDNA | IDT | For IVT of cr_F1 | GTTTTAGACCCCTGCAATTTTGCACGGGTGTAGTTCGCATTTCA |
| | | | | GTCAGTTGCTCAATGTACCTATGTTTTAGACCCCTGCAATTTTG |
| | | | | CACGGGTGTAGTTCCCCTATAGTGAGTCGTATTACTCGAGGAAT |
| | | | | TCTTATTATTTCT (SEQ ID NO: 111) |
| cr_F4_IVT_rev | ssDNA | IDT | For IVT of cr_F4 | GTTTTAGACCCCTGCAATTTTGCACGGGTGTAGTTCACGCCTGA |
| | | | | ATAAGTGATAATAAGCGGATGAGTTTTAGACCCCTGCAATTTTG |
| | | | | CACGGGTGTAGTTCCCCTATAGTGAGTCGTATTACTCGAGGAAT |
| | | | | TCTTATTATTTCT (SEQ ID NO: 112) |
| cr_F7_IVT_rev | ssDNA | IDT | For IVT of cr_F7 | GTTTTAGACTAGTGCAAATTCGCACCAGTGTAGTAGAGCTGGTG |
| | | | | ATATGGGATAGTGTTCACCCTTGGTTTTAGACTAGTGCAAATTT |
| | | | | GCACCAGTGTAGTAGCCCTATAGTGAGTCGTATTACTCGAGGGA |
| | | | | TCCTTATTACATTT (SEQ ID NO: 113) |
| cr_F1O_IVT_rev | ssDNA | IDT | For IVT of cr_F10 | GTTTTAGACTAGTGCAAATTCGCACCAGTGTAGTAGTTCGTTAA |
| | | | | TACAGATGTAGGTGTTCCACAGGGTTTTAGACTAGTGCAAATTT |
| | | | | GCACCAGTGTAGTAGCCCTATAGTGAGTCGTATTACTCGAGGGA |
| | | | | TCCTTATTACATTT (SEQ ID NO: 114) |
| cr_3_IVT_rev | ssDNA | IDT | For IVT of cr_3 | GTTTTAGTCCCCTTCGTTTTTGGGGTAGTCTAAATCCTAAGGAA |
| | | | | GCTAAAATGGAGAAAAAAATGTTTTAGTCCCCTTCGTTTTTGGG |
| | | | | GTAGTCTAAATCCCCTATAGTGAGTCGTATTACTCGAGGGATCC |
| | | | | TTATTACATTT (SEQ ID NO: 115) |
| cr_4_IVT_rev | ssDNA | IDT | For IVT of cr_4 | GTTTTAGTCCCCTTCGTTTTTGGGGTAGTCTAAATCGCTGGATG |
| | | | | GCCTICCCCATTATGATTCTGITTTAGTCCCCTTCGTTTTTGGG |
| | | | | GTAGTCTAAATCCCCTATAGTGAGTCGTATTACTCGAGGGATCC |
| | | | | TTATTACATTT (SEQ ID NO: 116) |
| sub_F1_rev | ssDNA | IDT | For IVT of sub_F1 | ATACGCTGTGGTTCGCCAAGTCCCAATGGCATCGTAAAGAACAT |
| | | | | TTTGAGGCATTTCAGTCAGTTGCTCAATGTACCTATAACCAGAC |
| | | | | CGTTCAGCTGGATATTACGGCCAAGAGAGCACGAAAGTGTTG |
| | | | | (SEQ ID NO: 117) |
| sub_F4_rev | ssDNA | IDT | For IVT of sub_F4 | ATACGCTGTGGTTCGCCAAGAGTTATTGGTGCCCTTAAACGCCT |
| | | | | GGTGCTACGCCTGAATAAGTGATAATAAGCGGATGAATGGCAGA |
| | | | | AATTCGAAAGCAAATTCGACCCAAGAGAGCACGAAAGTGTTG |
| | | | | (SEQ ID NO: 118) |
| sub_F7_rev | ssDNA | IDT | For IVT of sub_F7 | ATACGCTGTGGTTCGCCAAGCGGAATTCCGTATGGCAATGAAAG |
| | | | | ACGGTGAGCTGGTGATATGGGATAGTGTTCACCCTTGTTACACC |
| | | | | GTTTTCCATGAGCAAACTGAAACAAGAGAGCACGAAAGTGTTG |
| | | | | (SEQ ID NO: 119) |
| sub_F10_rev | ssDNA | IDT | For IVT of sub_F10 | ATACGCTGTGGTTCGCCAAGCTCCCAGAGCCTGATAAAAACGGT |
| | | | | TAGCGCTTCGTTAATACAGATGTAGGTGTTCCACAGGGTAGCCA |
| | | | | GCAGCATCCTGCGATGCAGATCCAAGAGAGCACGAAAGTGTTG |
| | | | | (SEQ ID NO: 120) |
| PT7_Sub_fw | ssDNA | IDT | For PCR all target | CGAAATTAATACGACTCACTATAGGGATACGCTGTGGTTCGCCA |
| | | | substrates for IVT | AG (SEQ ID NO: 121) |
| Sub_ry | ssDNA | IDT | For PCR all target | CGAAATTATTTCGACTGAGATTATTCCCCAACACTTTCGTGCTC |
| | | | substrates for IVT | TCTT (SEQ ID NO: 122) |
| GFP_PCR_fwd | ssDNA | IDT | For PCR GFP gene | GATGCGTCCGGCGTAGAGGATCGAGATCTC (SEQ ID NO: |
| | | | for IVT | 123) |

Notes:
IDT IVT: ssDNA primers from IDT were directly annealed with the T7_primer and transcribed
PCR IVT: a PCR using the IDT oligo or GFP as a template was used first to create the dsDNA with the T7 promoter sequence, on which IVT was then performed
IDT: primers ordered from Integrated DNA Technologies

### REFERENCES

[0455] East-Seletsky, A., O'Connell, M. R., Knight, S. C., Burstein, D., Cate, J. H. D., Tjian, R., and Doudna, J. A. (2016). Two distinct RNase activities of CRISPR-C2c2 enable guide-RNA processing and RNA detection. Nature 538, 270-273.
[0456] Knott, G. J., East-Seletsky, A., Cofsky, J. C., Holton, J. M., Charles, E., O'Connell, M. R., and Doudna, J. A. (2017). Guide-bound structures of an RNA-targeting A-cleaving CRISPR-Cas13aenzyme. Nat. Struct. Mol. Biol. 24, 825-833.

### Example 4. Validation of Type VI-D CRISPR-Cas Systems Comprising Cas13d and WYL1 Activity In Vitro (Biochemically)

[0457] Putative accessory proteins containing WYL domains and additional predicted DNA-binding domains are present in the great majority of the Type VI-D loci (FIG. 1). We initially synthesized and screened the predicted minimal CRISPR-Cas system for RspCas13d including both the RspCas13d effector and RspWYL1 accessory protein. To investigate the modulation of Cas13d by WYL1, we screened both the RspCas13d effector and RspWYL1 accessory protein separately. Comparison of screening results for RspCas13d effector alone versus the RspCas13d system, including RspWYL1, shows that RspCas13d targeted RNA cleavage is increased in the presence of RspWYL1 (FIGS. 27A-B). Bacterial screening with RspWYL1 alone yielded a minimal number of hits, indicating that RspWYL1 has no individual activity (FIG. 28). Cumulatively, these results suggest that RspCas13d enzymatic activity is modulated either directly or indirectly by WYL1.

[0458] We further investigated whether WYL1 could modulate RspCas13d in vitro by purifying recombinant RspWYL1 for use in ssRNA cleavage biochemical assays. To enable high resolution of enhanced or decreased complex activity in the presence of WYL, we selected doses of Cas13d-crRNA complex resulting in approximately 50% cleavage of the target substrates based on a dose titration curve (FIGS. 24A-B). We pre-incubated Cas13d-crRNA with no RspWYL1, an equimolar ratio of RspWYL1 to Cas13d, or a molar excess of RspWYL1 over Cas13d, and the resulting samples were incubated with target and collateral ssRNA under the same conditions as in the target cleavage assays. We observed that RspWYL1 increases both the targeted and collateral ssRNA cleavage activity of RspCas13d in a dose-dependent manner, with a molar excess of RspWYL1 yielding the greatest increase in Cas13d activity (FIGS. 29A-C).

[0459] Given that Type VI-D CRISPR-Cas systems appear to have acquired WYL-domain containing accessory proteins on multiple, independent occasions (FIGS. 1, 6, 8, 9), we tested the specificity of RspWYL1 in modulating the cleavage activity of orthologous Cas13d effectors. We observed that RspWYL1 enhanced the targeted and collateral ssRNA nuclease activities of EsCas13d to a similar extent as observed for RspCas13d (FIG. 30A-B). Thus, the effects of WYL1 orthologs appear not to be limited to their native effectors, but instead reflect a modular regulatory mechanism for Cas13d effectors.

[0460] To test whether RspWYL1 could modulate the activity of a type VI-B Cas13b effector, in vitro ssRNA cleavage biochemical assays were performed using recombinant RspWYL1 and Bergeyella zoohelcum Cas13b (BzCas13b). As shown in FIG. 31, RspWYL1 enhanced the activity of BzCas13b, demonstrating that this accessory protein is also capable of enhancing the activity of Cas13b effectors.

### Example 5. Type VI-D CRISPR-Cas Systems can be Used with a Fluorescent Reporter for the Specific Detection of Nucleic Acid Species

[0461] The dual nuclease activities of Cas13 effectors (i.e., target-specific and non-specific collateral RNase activity) make these effectors promising candidates for use in the detection of nucleic acid species. Some of these methods have been previously described (see, e.g., East-Seletsky et al. (2016), Gootenberg et al. (2017), and Gootenberg et al. (2018) “Multiplexed and portable nucleic acid detection platform with Cas13, Cas12a, and Csm6” Science 15 Feb. 2018: eaaq0179), describing the general principle of RNA detection using Cas13a (East-Seletsky et al. (2016)), supplemented by amplification to increase the detection sensitivity and optimization of additional Cas13a enzymes (Gootenberg et al. (2017)), and most recently, the inclusion of additional RNA targets, orthologous and paralogous enzymes, and Csm6 activator to enable multiplexed detection of nucleic acids along with an increase in detection sensitivity (Gootenberg et al. (2018)). The addition of Cas13d to this toolkit not only provides an additional channel of orthogonal activity for nucleic acid detection, but the nuclease activity-enhancing effect of the WYL1 proteins across orthologous and paralogous effectors suggests that WYL1 proteins can play an activity-enhancing role.

[0462] We tested the ability of EsCas13d or RspCas13d to cleave RNaseAlert® v2 (Thermo Fisher) substrate under different buffer conditions. Using a buffer of 50 mM potassium acetate, 20 mM Tris-acetate, 10 mM magnesium acetate, 100 μg/ml BSA, pH 7.9 provided key improvements from the described cleavage or processing buffers in the following: 1) maximum differentiation of targeting vs. non-targeting, 2) total fluorescence signal intensity, and 3) sufficient stability to support enzyme activity for the duration of the measurement.

[0463] We next tested different short fluorescent-quencher RNA substrates for the fluorescent detection of the collateral effect. These included RNase alert v2, a poly-G, and a poly-U substrate. We performed this experiment using a final reaction concentration of 40 nM of the Cas13d effector, 20 nM of crRNA, 5 nM of the target or nontarget RNA, and 160 nM of the fluorescent-quencher substrate along with 0.5 μL of the murine RNase inhibitor (in 50 uL) in the optimized buffer condition as described above. The reaction was incubated for 3 hours at 37° C. and the fluorescence read out using a Lightcycler 480 II at one-minute intervals. This demonstrated that both RspCas13d and EsCas13d can differentiate between a targeting vs. a non-targeting RNA using a poly-U substrate (FIG. 32). Furthermore, the differences between the activity of the two Cas13d effectors on the different substrate identities suggests the possibility of having multiple channels for the reporter.

[0464] The methods described above can include additional improvements to increase detection sensitivity. For example, a pre-amplification step of a nucleic acid in the sample (e.g., a target nucleic acid of interest) may be performed. These pre-amplification step can be performed by any method known in the art including, but not limited to, enzymatic methods such as isothermal amplification and recombinase polymerase amplification (RPA), as well as physical enrichment using methods such as immunoprecipitation. Furthermore, for the detection of DNA species, samples including the DNA species may be transcribed to convert the substrate into a Cas13d compatible substrate (e.g., RNA) while amplifying the target. A number of existing methods for nucleic acid enrichment or background amplification suppression can also be performed to increase the sensitivity and specificity of detection.

### Example 6. Type VI-D CRISPR-Cas Systems can be Used to Provide Genotype-Gated Control of Cell Death or Dormancy

[0465] Hybridization of the Type VI-D CRISPR-Cas effector protein and crRNA with an RNA target complementary to the crRNA spacer forms an active complex that may exhibit nonspecific, “collateral” RNase activity. Such collateral RNAse activity can be used to provide genotype-gated control of cell death or dormancy. The dependence of such activity on the presence of a specific RNA target in a cell is valuable since it enables targeting of specific cell populations based on specific underlying transcriptional states or genotypes. Numerous applications exist in both eukaryotic and prokaryotic settings for such control of cell death or dormancy.

[0466] For prokaryotic applications, a Type VI-D CRISPR-Cas system (e.g., including a Type VI-D effector and a crRNA) can be delivered (e.g., in vitro or in vivo) in order to induce cell death or dormancy of specific prokaryote populations (e.g., bacterial populations) in a genotype and transcriptome-specific way. For instance, the Type VI-D CRISPR-Cas system can include one or more crRNAs that specifically target a particular prokaryotic genus, species, or strain. This specific targeting has many therapeutic benefits as it may be used to induce death or dormancy of undesireable bacteria (e.g., pathogenic bacteria such as Clostridium difficile). In addition, the Type VI-D systems provided herein may be used to target prokaryotic cells having specific genotypes or transcriptional states. Within the microbial diversity that colonizes humans, only a small number of bacterial strains can induce pathogenesis. Further, even within pathogenic strains such as Clostridium difficile, not all members of the bacterial population exist continuously in active, disease-causing states. Thus, using RNA-targeting to control the activity of an Type VI-D effector based on the genotype and transcriptional state of a prokaryotic cell allows for specific control of which cells are targeted without disrupting the entire microbiome.

[0467] Additionally, bacterial strains can be readily engineered with genetic circuits or environmentally-controlled expression elements to generate genetic kill switches that limit the growth, colonization, and/or shedding of the engineered bacterial strains. For example, the expression of a TypeVI-D effectors, specific crRNA, or specific target RNA, can be controlled using promoters derived from the regulatory regions of genes encoding proteins expressed in response to external stimuli, such as cold sensitive proteins (PcspA), heat shock proteins (Hsp), chemically inducible systems (Tet, Lac, AraC). The controlled expression of one or more elements of the Type VI-D system allows for the full functional system to be expressed only upon exposure to an environmental stimulus, which in turn activates the nonspecific RNase activity of the system and thereby induces cell death or dormancy. Kill switches including Cas13d effectors as those described herein may be advantageous over traditional kill switch designs such as toxin/antitoxin systems (e.g., CcdB/CcdA Type II toxin/antitoxin systems), since they are not dependent on relative protein expression ratios which may be affected by leaky expression from a promoter (e.g., an environmental-stimulus dependent promoter), and thus allow for more precise control of the kill-switch.

[0468] To assess the ability of Cas13d to directly induce the dormancy or death of bacteria cells upon recognition of a target RNA, a variation of the in vivo functional screening described in Example 2 was performed, in which the antibiotic tetracycline was removed from the culture plate. Removing tetracycline selection meant that the survival of the host E. coli was no longer dependent on the successful natural expression of the tetracycline resistance protein by pACYC184. However, the targeting library still contained crRNAs with spacers to the tetracycline resistance gene, Tc^{R}. When the dependence of E. coli survival on successful Tc^{R} expression is removed, one would expect that there would be no impact on E. coli survival if the Cas13d effector directly cleaved Tc^{R} mRNA, and thus no Tc^{R} targeting spacers should register as strong depletion event on the in vivo screen. Nevertheless, the screening data without tetracycline selection still showed strongly depleted spacers on the Tc^{R} gene (FIGS. 33A-B, 34A-B), suggesting that the effect of Cas13d targeting RNA alone can mediate a growth disadvantage or cell death, even without antibiotic selection.

[0469] For eukaryotic applications, many diseases result from specific genotypes or transcriptional states in the diseased cells that distinguish them from healthy cells. Disease related genotypes are often contained in regions of the genome that are expressed, generating transcripts that can be targeted by a Type VI-D effector using a crRNA that specifically targets the genotype. Such targeting can provide cell dormancy or cell death in a population of cells with a specific disease related mutations. An exemplary application is the targeted depletion of cancer cells containing specific mutations, such as driver mutations that occur spontaneously in the tumor microenvironment. In addition, the Type VI-D CRISPR-Cas systems described herein can be used as kill-switch mechanisms to induce the death or dormancy of recombinant eukaryotic cells, such as chimeric antigen receptor-expressing T-cells, to limit their activity in inappropriate environments or when no longer desired.

[0470] Additionally, in a therapeutic context, numerous disease processes often involve dysregulation of cellular pathways that result in transcriptional states that are different from the normal baseline. A Type VI-D CRISPR-Cas system can be used to specifically induce the death or dormancy of cells that have an altered transcriptome. For example, the system can be used to induce the death or dormancy of cells having a temporally altered transcriptome, such as cells involved in an anti-inflammatory response during an autoimmune disease flare that are differentiated from normal cells.

[0471] The expression of the Type VI-D CRISPR-Cas systems described herein can be controlled and expressed using synthetic biology to induced or trigger cell death or dormancy. For example, the expression of genes encoding each of the components of the Type VI-D CRISPR-Cas systems can be controlled using genetic elements including, but are not limited to, promoters that are regulated by environmental stimuli, such as hypoxia (hif), neuronal activity (fos, arc), heat-shock (HSF-1), or exogenous controls such as light (FixJ), steroids (LexA), alcohol (AlcA), tetracycline (Tet). These promoters can be used to control the expression of components of the Type VI-D CRISPR-Cas system and/or of a specific RNA target to activate the system, thereby inducing the death or dormancy of targeted cells in response to the particular environmental stimuli to which the promoters respond.

### Example 7. Adaptation of Type VI-D CRISPR Cas System Effectors for Eukaryotic and Mammalian Activity

[0472] Beyond the biochemical and diagnostic applications described herein, programmable RNA-modifying CRISPR-Cas systems such as Type VI-D, e.g., Cas13d, systems described herein have important applications in eukaryotic cells, ranging from therapeutic uses such as disease transcript correction, to research and development advances, such as for transcriptome engineering and RNA visualization.

[0473] To develop Type VI-D CRISPR Cas systems for eukaryotic applications, the constructs encoding the protein effectors are first codon-optimized for expression in mammalian cells, and specific localization tags are optionally appended to either or both the N-terminus or C-terminus of the effector protein. These localization tags can include sequences such as nuclear localization signal (NLS) sequences, which localize the effector to the nucleus for modification of nascent RNAs, as well as nuclear export signal (NES) sequences, which target the effector to the cytoplasm in order to modify mature RNAs.

[0474] These sequences are described above in the “Functional Mutations” section. Other accessory proteins, such as fluorescent proteins, may be further appended. It has been demonstrated that the addition of robust, “superfolding” proteins such as superfolding green fluorescent protein (GFP) can increase the activity of Cas13 enzymes in mammalian cells when appended to the effector (Abudayyeh et al. (2017) Nature 550(7675): 280-4, and Cox et al. (2017) Science 358(6366): 1019-27).

[0475] The codon-optimized sequence coding for the Cas13d effector and appended accessory proteins and localization signals is then cloned into a eukaryotic expression vector with the appropriate 5′ Kozak eukaryotic translation initiation sequence, eukaryotic promoters, and polyadenylation signals. In mammalian expression vectors, these promoters can include, e.g., general promoters such as CMV, EF1a, EFS, CAG, SV40, and cell-type specific RNA polymerase II promoters such as Syn and CamKIIa for neuronal expression, and thyroxine binding globulin (TBG) for hepatocyte expression to name a few. Similarly, useful polyadenylation signals include, but are not limited to, SV40, hGH, and BGH. For expression of the pre-crRNA or mature crRNA, RNA polymerase III promoters such as H1 or U6 can be used.

[0476] Depending on the application and mode of packaging, the eukaryotic expression vector can be a lentiviral plasmid backbone, adeno-associated viral (AAV) plasmid backbone, or similar plasmid backbone capable of use in recombinant viral vector production. Notably, the small size of Type VI-D CRISPR Cas effector proteins, e.g., Cas13d effector proteins, make them ideally suited for packaging along with its crRNA and appropriate control sequences into a single adeno-associated virus particle; the packaging size limit of 4.7 kb for AAV may preclude the use of larger Cas13 effectors.

[0477] After adapting the sequences, delivery vectors, and methods for eukaryotic and mammalian use, different Cas13d constructs as described herein are characterized for performance. For efficient testing of the mammalian activity levels of various constructs, we use a dual-luciferase reporter expressing both Gaussia luciferase (Gluc) and Cypridinia luciferase (Cluc) (Abudayyeh et al. (2017) Nature 550(7675): 280-4). Targeting the Gluc transcript and comparing the relative activity versus the internal control of the Cluc activity enables an estimation of Cas13d effectiveness in a mammalian context. This activity is corroborated on the reporter through knockdown of endogenous transcripts, such as from the well-characterized KRAS genetic locus. The dual-luciferase reporter construct along with plasmids expressing the type VI-D CRISPR-Cas system and cognate crRNA are delivered using transient transfection (e.g., Lipofectamine® 2000) into model cell lines such as HEK 293T cells.

[0478] In addition to testing various construct configurations and accessory sequences on individual targets, pooled library-based approaches are used to determine 1) any targeting dependency of specific Cas13d effector proteins in mammalian cells as well as 2) the effect of mismatch locations and combinations along the length of the targeting crRNA. Briefly, the pooled library includes a plasmid that expresses a target RNA containing different flanking sequences as well as mismatches to the guide or guides used in the screening experiment, such that the successful target recognition and cleavage results in depletion of the sequence from the library. Furthermore, mRNA sequencing can be used to determine the off-target RNA cleavage effects of the type VI-D CRISPR-Cas system.

[0479] Complementary to the possibilities of transcriptome modification using the RNA cleavage activity of Cas13d, we can also explore the applications of catalytically-inactive Cas13d effector proteins in which the conserved residues of the two HEPN domains are mutated from the arginine and histidine to alanine. Like other Cas13 enzymes, catalytically inactive Cas13d (known as dCas13d) likely will retain its programmable RNA binding activity, though it will no longer be able to cleave target or collateral RNA.

[0480] In addition to direct uses of dCas13d such as in RNA immunoprecipitation, transcript labeling (when dCas13d effector is fused with fluorescent protein), and translation modification through site-specific targeted disruption of native translational machinery, other domains can be appended onto the dCas13d protein to provide further functionality. Activities of these domains include, but are not limited to, RNA base modification (ADAR1, ADAR2, APOBEC), RNA methylation (m⁶A methyltransferases and demethylases), splicing modifiers (hnRNPA1), localization factors (KDEL retention sequence, mitochondrial targeting signal, peroxisomal targeting signal), translation modification factors (EIF4G translation initiation factor, GLD2 poly(A) polymerase, transcriptional repressors). Additionally, domains can be appended to provide additional control, such as light-gated control (cryptochromes) and chemically inducible components (FKBP-FRB chemically inducible dimerization).

[0481] Optimizing the activity of such fusion proteins requires a systematic way of comparing linkers that connect the dCas13d with the appended domain. These linkers may include, but are not limited to, flexible glycine-serine (GS) linkers in various combinations and lengths, rigid linkers such as the alpha-helix forming EAAAK (SEQ ID NO: 124) sequence, XTEN linker (Schellenberger V, et al. Nat. Biotechnol. 2009; 27:1186-1190), as well as different combinations thereof (see TABLE 10). The various designs are then assayed in parallel over the same crRNA target complex and functional readout to determine which one yields the desired properties.

[0482] For adapting Cas13d for use in targeted RNA base modification (see, e.g., Cox DBT et al., Science 2017 10.1126/science.aaq0180), we begin with the Cas13d ortholog and NES combination that yielded the highest endogenous mammalian RNA knockdown activity and mutate the conserved residues of the two HEPN domains to create a catalytically inactive enzyme. Next, a linker is used to create the fusion protein between Cas13d-NES and the base editing domain. Initially, this domain will consist of the ADAR2DD(E488Q/T375G) mutant engineered previously for hyperactivity and greater specificity when used with Cas13b in REPAIRv2, but alternate deaminases such as ADAR1 and APOBEC1, among others, can be engineered and assayed in parallel (TABLE 10). Given the likely structural differences between the smaller Cas13d versus the previously characterized Cas13 effectors, alternate linker designs and lengths may yield the optimal design of the base editing fusion protein.

[0483] To evaluate the activity of the dCas13d-derived base editors, the HEK 293T cells are transiently transfected with the dCas13d-ADAR construct, a plasmid expressing the crRNA, and optionally, a reporter plasmid if targeting the reporter and not an endogenous locus. The cells are harvested 48 hours after transient transfection, the the RNA is extracted and reverse-transcribed to yield a cDNA library that is prepared for next generation sequencing. Analysis of the base composition of loci of samples containing the targeting vs. negative control non-targeting crRNAs provide information about the editing efficiency, and analysis of broader changes to the transcriptome will yield information about the off-target activity.

[0484] One particular advantage of developing an RNA base editing system using Cas13d is that the small size, on average 20% smaller than the existing Cas13 effectors, enables more ready packaging in AAV of dCas13d-ADAR along with its crRNA and control elements without the need for protein truncations. This all-in-one AAV vector enables greater efficacy of in vivo base editing in tissues, which is particularly relevant as a path towards therapeutic applications of Cas13d. In base editing and other applications, the small size, the lack of a biochemical PFS, and robust activity of Cas13d effectors make it a valuable addition to the toolbox of programmable RNA modifying enzymes.

[0485] Multiplexing of Cas13d with multiple crRNAs targeting different sequences enables the manipulation of multiple RNA species for therapeutic applications requiring manipulation of multiple transcripts simultaneously.

TABLE 10
Amino Acid Sequences of Motifs and Functional
Domains in Engineered Variants of Type VI-D
CRISPR-Cas Effector Proteins

>LINKER_1
GS
>LINKER_2
GSGGGGS (SEQ ID NO: 125)
>LINKER_3
GGGGSGGGGSGGGGS (SEQ ID NO: 126)
>LINKER_4
GGSGGSGGSGGSGGSGGS (SEQ ID NO: 127)
[ADAR1, ADAR2: C-term fusion
(or optionally N-term)]
>ADAR1DD-WT
SLGTGNRCVKGDSLSLKGETVNDCHAEIISRRGFIRFLYSELMKYNSQTA
KDSIFEPAKGGEKLQIKKTVSFHLYISTAPCGDGALFDKSCSDRAMESTE
SRHYPVFENPKQGKLRTKVENGEGTIPVESSDIVPTWDGIRLGERLRTMS
CSDKILRWNVLGLQGALLTHFLQPIYLKSVTLGYLFSQGHLTRAICCRVT
RDGSAFEDGLRHPFIVNHPKVGRVSIYDSKRQSGKTKETSVNWCLADGYD
LEILDGTRGTVDGPRNELSRVSKKNIFLLFKKLCSFRYRRDLLRLSYGEA
KKAARDYETAKNYFKKGLKDMGYGNWISKPQEEKNF (SEQ ID NO:
128)
>ADAR1DD-E1008Q (Cox et al., 2017)
SLGTGNRCVKGDSLSLKGETVNDCHAEIISRRGFIRFLYSELMKYNSQTA
KDSIFEPAKGGEKLQIKKTVSFHLYISTAPCGDGALFDKSCSDRAMESTE
SRHYPVFENPKQGKLRTKVENGQGTIPVESSDIVPTWDGIRLGERLRTMS
CSDKILRWNVLGLQGALLTHFLQPIYLKSVTLGYLFSQGHLTRAICCRVT
RDGSAFEDGLRHPFIVNHPKVGRVSIYDSKRQSGKTKETSVNWCLADGYD
LEILDGTRGTVDGPRNELSRVSKKNIFLLFKKLCSFRYRRDLLRLSYGEA
KKAARDYETAKNYFKKGLKDMGYGNWISKPQEEKNF (SEQ ID NO:
129)
>ADAR2DD-WT
QLHLPQVLADAVSRLVLGKFGDLTDNFSSPHARRKVLAGVVMTTGTDVKD
AKVISVSTGTKCINGEYMSDRGLALNDCHAEIISRRSLLRFLYTQLELYL
NNKDDQKRSIFQKSERGGFRLKENVQFHLYISTSPCGDARIFSPHEPILE
EPADRHPNRKARGQLRTKIESGEGTIPVRSNASIQTWDGVLQGERLLTMS
CSDKIARWNVVGIQGSLLSIFVEPIYFSSIILGSLYHGDHLSRAMYQRIS
NIEDLPPLYTLNKPLLSGISNAEARQPGKAPNFSVNWTVGDSAIEVINAT
TGKDELGRASRLCKHALYCRWMRVHGKVPSHLLRSKITKPNVYHESKLAA
KEYQAAKARLFTAFIKAGLGAWVEKPTEQDQFSLT (SEQ ID NO:
130)
>ADAR2DD-E488Q (Cox et al., 2017)
QLHLPQVLADAVSRLVLGKFGDLTDNFSSPHARRKVLAGVVMTTGTDVKD
AKVISVSTGTKCINGEYMSDRGLALNDCHAEIISRRSLLRFLYTQLELYL
NNKDDQKRSIFQKSERGGFRLKENVQFHLYISTSPCGDARIFSPHEPILE
EPADRHPNRKARGQLRTKIESGQGTIPVRSNASIQTWDGVLQGERLLTMS
CSDKIARWNVVGIQGSLLSIFVEPIYFSSIILGSLYHGDHLSRAMYQRIS
NIEDLPPLYTLNKPLLSGISNAEARQPGKAPNFSVNWTVGDSAIEVINAT
TGKDELGRASRLCKHALYCRWMRVHGKVPSHLLRSKITKPNVYHESKLAA
KEYQAAKARLFTAFIKAGLGAWVEKPTEQDQFSLT (SEQ ID NO:
131)
[Cytidine deaminase, AID, APOBEC1: N-term
fusion (or optionally C-term)]
>AID-APOBEC1 (Dickerson et al., 2003,
Komor et al., 2017)
[sequence omitted]
(SEQ ID NO: 132)
>Lamprey_AID-APOBEC1 (Rogozin et al.,
2007, Komor et al., 2017)
MTDAEYVRIHEKLDIYTFKKQFFNNKKSVSHRCYVLFELKRRGERRACFW
GYAVNKPQSGTERGIHAEIFSIRKVEEYLRDNPGQFTINWYSSWSPCADC
AEKILEWYNQELRGNGHTLKIWACKLYYEKNARNQIGLWNLRDNGVGLNV
MVSEHYQCCRKIFIQSSHNQLNENRWLEKTLKRAEKRRSELSIMIQVKIL
HTTKSPAV (SEQ ID NO: 133)
>APOBEC1_BE1 (Komor et al., 2016)
MSSETGPVAVDPTLRRRIEPHEFEVFFDPRELRKETCLLYEINWGGRHSI
RHTSQNTNKHVEVNFIEKFTTERYFCPNTRCSITWFLSWSPCGECSRAIT
EFLSRYPHVTLFIYIARLYHHADPRNRQGLRDLISSGVTIQIMTEQESGY
CWRNFVNYSPSNEAHWPRYPHLWVRLYVLELYCIILGLPPCLNILRRKQP
QLTFFTIALQSCHYQRLPPHILWATGLK (SEQ ID NO: 134)

### REFERENCES

[0486] Abudayyeh, O. O., Gootenberg, J. S., Essletzbichler, P., Han, S., Joung, J., Belanto, J. J., Verdine, V., Cox, D. B. T., Kellner, M. J., Regev, A., et al. (2017). RNA targeting with CRISPR-Cas13. Nature 550, 280-284.
[0487] Cox, D. B. T., Gootenberg, J. S., Abudayyeh, O. O., Franklin, B., Kellner, M. J., Joung, J., and Zhang, F. (2017). RNA editing with CRISPR-Cas13. Science 358, 1019-1027.
[0488] Schellenberger V., Wang C. W., Geething N. C., Spink, B. J., Campbell, A., To, W., Scholle, M. D., Yin, Y., Yao, Y., Bogin, O., et al. (2009). A recombinant polypeptide extends the in vivo half-life of peptides and proteins in a tunable manner. Nat Biotechnol 2009; 27:1186-1190.

### Other Embodiments

[0489] It is to be understood that while the invention has been described in conjunction with the detailed description thereof, the foregoing description is intended to illustrate and not limit the scope of the invention, which is defined by the scope of the appended claims. Other aspects, advantages, and modifications are within the scope of the following claims.

What is claimed is:

1. An engineered, non-naturally occurring Clustered Regularly Interspaced Short Palindromic Repeat (CRISPR)—associated (Cas) system comprising:
an RNA guide or a nucleic acid encoding the RNA guide, wherein the RNA guide comprises a direct repeat sequence and a spacer sequence capable of hybridizing to a target nucleic acid; and
a Type VI-D CRISPR-Cas effector protein or a nucleic acid encoding the effector protein, wherein the effector protein comprises an amino acid sequence having at least 85% sequence identity to an amino acid sequence provided in Table 2, wherein the effector protein is capable of binding to the RNA guide and of targeting the target nucleic acid sequence complementary to the RNA guide spacer sequence.

2. The system of claim 1, wherein the effector protein comprises an amino acid sequence provided in Table 2.

3. The system of claim 1, wherein the effector protein is RspCas13d (SEQ ID NO: 2) or EsCas13d (SEQ ID NO: 1).

4. The system of any one of claims 1-3, wherein the effector protein comprises at least two HEPN domains, wherein none, one, or two of the HEPN domains are catalytically deactivated.

5. An engineered, non-naturally occurring Clustered Regularly Interspaced Short Palindromic Repeat (CRISPR)—associated (Cas) system comprising:
an RNA guide or a nucleic acid encoding the RNA guide, wherein the RNA guide comprises a direct repeat sequence and a spacer sequence capable of hybridizing to a target nucleic acid;
a CRISPR-associated protein or a nucleic acid encoding the CRISPR-associated protein; and
an accessory protein or a nucleic acid encoding the accessory protein, wherein the accessory protein comprises:
i) at least one WYL domain, wherein the WYL domain comprises an amino acid sequence PXXX₁XXXXXXXXXYL (SEQ ID NO: 198), wherein X₁ is C, V, I, L, P, F, Y, M, or W, and wherein X is any amino acid; and
ii) at least one ribbon-ribbon-helix (RHH) fold or at least one helix-turn-helix (HTH) domain;
wherein the CRISPR-associated protein is capable of binding to the RNA guide and of targeting the target nucleic acid sequence complementary to the spacer sequence, and wherein the accessory protein modulates an activity of the CRISPR-associated protein.

6. An engineered, non-naturally occurring Clustered Regularly Interspaced Short Palindromic Repeat (CRISPR)—associated (Cas) system comprising:
an RNA guide or a nucleic acid encoding the RNA guide, wherein the RNA guide comprises a direct repeat sequence and a spacer sequence capable of hybridizing to a target nucleic acid;
a CRISPR-associated protein or a nucleic acid encoding the CRISPR-associated protein; and
an accessory protein or a nucleic acid encoding the accessory protein, wherein the accessory protein comprises at least one WYL domain, and wherein the accessory protein comprises an amino acid sequence having at least 85% sequence identity to an amino acid sequence provided in any one of Tables 4, 5, and 6;
wherein the CRISPR-associated protein is capable of binding to the RNA guide and of targeting the target nucleic acid sequence complementary to the spacer sequence, and wherein the accessory protein modulates an activity of the CRISPR-associated protein.

7. The system of claim 5 or claim 6, wherein the activity is a nuclease activity.

8. The system of claim 7, wherein the nuclease activity is a DNAse activity.

9. The system of claim 7, wherein the nuclease activity is a targeted RNAse activity or a collateral RNAse activity.

10. The system of any one of claims 5-9, wherein the accessory protein increases the activity of the CRISPR-associated protein.

11. The system of any one of claims 5-9, wherein the accessory protein decreases the activity of the CRISPR-associated protein.

12. The system of any one of claims 6-11, wherein the accessory protein comprises an amino acid sequence provided in any one of Tables 4, 5, and 6.

13. The system of claim 5 or claim 6, wherein the accessory protein is RspWYL1 (SEQ ID NO: 81).

14. The system of any one of claims 5-13, wherein the targeting of the target nucleic acid results in a modification of the target nucleic acid.

15. The system of any one of claims 5-14, wherein the CRISPR-associated protein is a Class 2 CRISPR-Cas system protein.

16. The system of any one of claims 5-15, wherein the CRISPR-associated protein comprises a RuvC domain.

17. The system of any one of claims 5-15, wherein the CRISPR-associated protein is selected from the group consisting of a Type VI Cas protein, a Type V Cas protein, and a Type II Cas protein.

18. The system of any one of claims 5-15, wherein the CRISPR-associated protein is a Cas13a protein, a Cas13b protein, a Cas13c protein, a Cas12a protein, or a Cas9 protein.

19. The system of any one of claims 5-15, wherein the CRISPR-associated protein is a Type VI-D CRISPR-Cas effector protein comprising at least two HEPN domains, wherein none, one, or two of the HEPN domains are catalytically deactivated.

20. The system of claim 19, wherein the effector protein comprises an amino acid sequence having at least 85% sequence identity to an amino acid sequence provided in Table 2.

21. The system of claim 19 or claim 20, wherein the effector protein comprises an amino acid sequence provided in Table 2.

22. The system of any one of claims 19-21, wherein the effector protein is RspCas13d (SEQ ID NO: 2) or EsCas13d (SEQ ID NO: 1).

23. The system of any one of claims 1-22, wherein the target nucleic acid is an RNA.

24. The system of any one of claims 1-22, wherein the target nucleic acid is a DNA.

25. The system of any one of claims 1-4 and 14, wherein the modification of the target nucleic acid is a cleavage event.

26. The system of any one of claims 1-4, 14, and 25, wherein the modification results in: (a) decreased transcription; (b) decreased translation; or (c) both (a) and (b), of the target nucleic acid.

27. The system of any one of claims 1-4, 14, and 25, wherein the modification results in (a) increased transcription; (b) increased translation; or (c) both (a) and (b), of the target nucleic acid.

28. The system of any one of claims 4 and 19-22, wherein the effector protein comprises one or more amino acid substitutions within at least one of the HEPN domains.

29. The system of claim 28, wherein the one or more one amino acid substitutions comprise an alanine substitution at an amino acid residue corresponding to R295, H300, R849, or H854 of SEQ ID NO: 1, or R288, H293, R820, or H825 of SEQ ID NO: 2.

30. The system of claim 28 or claim 29, wherein the one or more amino acid substitutions result in a reduction of a nuclease activity of the Type VI-D CRISPR-Cas effector protein, as compared to the nuclease activity of the Type VI-D CRISPR-Cas effector protein without the one or more acid substitutions.

31. The system of any one of claims 1-30, wherein the direct repeat sequence comprises a nucleotide sequence provided in Table 3.

32. The system of any one of claims 1-30, wherein the direct repeat sequence comprises 5′-X₁X₂X₃X₄TX₅TX₆AAAC-3′ (SEQ ID NO: 199) at the 3′ terminal end of the RNA guide, and wherein X₁ is A or C or G, X₂ is A or G or T, X₃ is A or G or T, X₄ is C or G or T, X₅ is C or T, and X₆ is A or G.

33. The system of any one of claims 1-30, wherein the direct repeat sequence comprises either 5′-CACCCGTGCAAAATTGCAGGGGTCTAAAAC-3′ (SEQ ID NO: 152) or 5′-CACTGGTGCAAATTTGCACTAGTCTAAAAC-3′ (SEQ ID NO: 153).

34. The system of any one of claims 1-33, wherein the spacer comprises from about 15 to about 42 nucleotides.

35. The system of any one of claims 1-34, wherein the RNA guide further comprises a trans-activating CRISPR RNA (tracrRNA).

36. The system of any one of claims 1-35, further comprising a single-stranded donor template or a double-stranded donor template.

37. The system of claim 36, wherein the donor template is a DNA or an RNA.

38. The system of any one of claims 1-37, further comprising a target RNA or a nucleic acid encoding the target RNA, wherein the target RNA comprises a sequence that is capable of hybridizing to the spacer sequence of the RNA guide.

39. The system of any one of claims 1-38, wherein the system is present in a delivery system.

40. The system of claim 39, wherein the delivery system comprises a delivery vehicle selected from the group consisting of a nanoparticle, a liposome, an adeno-associated virus, an exosome, a microvesicle, and a gene-gun.

41. A cell comprising the system of any one of claims 1-40.

42. The cell of claim 41, wherein the cell is a eukaryotic cell.

43. The cell of claim 42, wherein the eukaryotic cell is a mammalian cell or a plant cell.

44. The cell of claim 41, wherein the cell is a prokaryotic cell.

45. The cell of claim 44, wherein the prokaryotic cell is a bacterial cell.

46. An animal model or a plant model comprising the cell of any one of claims 41-45.

47. A method of cleaving a target nucleic acid, the method comprising contacting the target nucleic acid with a system of any one of claims 1-40;
wherein the spacer sequence is complementary to at least 15 nucleotides of the target nucleic acid;
wherein the CRISPR-associated protein or the Type VI-D CRISPR effector protein associates with the RNA guide to form a complex;
wherein the complex binds to a target nucleic acid sequence that is complementary to the at least 15 nucleotides of the spacer sequence; and
wherein upon binding of the complex to the target nucleic acid sequence the CRISPR-associated protein or the Type VI-D CRISPR effector protein cleaves the target nucleic acid.

48. The method of claim 47, wherein the target nucleic acid is within a cell.

49. A method of inducing dormancy or death of a cell, the method comprising contacting the cell with a system of any one of claims 1-40;
wherein the spacer sequence is complementary to at least 15 nucleotides of the target nucleic acid;
wherein the CRISPR-associated protein or the Type VI-D CRISPR effector protein associates with the RNA guide to form a complex;
wherein the complex binds to a target nucleic acid sequence that is complementary to the at least 15 nucleotides of the spacer sequence; and
wherein upon binding of the complex to the target nucleic acid sequence the CRISPR-associated protein or the Type VI-D CRISPR-Cas effector protein cleaves a non-target nucleic acid within the cell, thereby inducing dormancy or death of the cell.

50. The method of any one of claims 47-49, wherein the target nucleic acid is an RNA selected from the group consisting of an mRNA, a tRNA, a ribosomal RNA, a non-coding RNA, a lncRNA, or a nuclear RNA.

51. The method of claim 49, wherein the target nucleic acid is a DNA selected from the group consisting of chromosomal DNA, mitochondrial DNA, single-stranded DNA, or plasmid DNA.

52. The method of any one of claims 47-51, wherein upon binding of the complex to the target nucleic acid, the CRISPR-associated protein or the Type VI-D CRISPR-Cas effector protein exhibits collateral RNAse activity.

53. The method of any one of claims 49-52, wherein the death is via apoptosis, necrosis, necroptosis, or a combination thereof.

54. The method of any one of claims 48-53, wherein the cell is a cancer cell.

55. The method of claim 54, wherein the cancer cell is a tumor cell.

56. The method of any one of claims 48-53, wherein the cell is an infectious agent cell or a cell infected with an infectious agent.

57. The method of claim 48-53, wherein the cell is a bacterial cell, a cell infected with a virus, a cell infected with a prion, a fungal cell, a protozoan, or a parasite cell.

58. A method of treating a condition or disease in a subject in need thereof, the method comprising administering to the subject a system of any one of claims 1-40,
wherein the spacer sequence is complementary to at least 15 nucleotides of a target nucleic acid associated with the condition or disease;
wherein the CRISPR-associated protein or the Type VI-D CRISPR-Cas effector protein associates with the RNA guide to form a complex;
wherein the complex binds to a target nucleic acid sequence that is complementary to the at least 15 nucleotides of the spacer sequence; and
wherein upon binding of the complex to the target nucleic acid sequence the CRISPR-associated protein or the Type VI-D CRISPR-Cas effector protein cleaves the target nucleic acid, thereby treating the condition or disease in the subject.

59. The method of claim 58, wherein the condition or disease is a cancer or an infectious disease.

60. The method of claim 59, wherein the condition or disease is cancer, and wherein the cancer is selected from the group consisting of Wilms' tumor, Ewing sarcoma, a neuroendocrine tumor, a glioblastoma, a neuroblastoma, a melanoma, skin cancer, breast cancer, colon cancer, rectal cancer, prostate cancer, liver cancer, renal cancer, pancreatic cancer, lung cancer, biliary cancer, cervical cancer, endometrial cancer, esophageal cancer, gastric cancer, head and neck cancer, medullary thyroid carcinoma, ovarian cancer, glioma, lymphoma, leukemia, myeloma, acute lymphoblastic leukemia, acute myelogenous leukemia, chronic lymphocytic leukemia, chronic myelogenous leukemia, Hodgkin's lymphoma, non-Hodgkin's lymphoma, and urinary bladder cancer.

61. A system according to any one of claims 1-40, for use in a method selected from the group consisting of RNA sequence specific interference; RNA sequence-specific gene regulation; screening of RNA, RNA products, lncRNA, non-coding RNA, nuclear RNA, or mRNA; mutagenesis; inhibition of RNA splicing; fluorescence in situ hybridization; breeding; induction of cell dormancy; induction of cell cycle arrest; reduction of cell growth and/or cell proliferation; induction of cell anergy; induction of cell apoptosis; induction of cell necrosis; induction of cell death; or induction of programmed cell death.

62. The system of claim 1, wherein the effector protein is fused to a base-editing domain, a RNA methyltransferase, a RNA demethylase, a splicing modifier, a localization factor, or a translation modification factor.

63. The system of claim 5 or claim 6, wherein the CRISPR-associated protein is fused to a base-editing domain, a RNA methyltransferase, a RNA demethylase, a splicing modifier, a localization factor, or a translation modification factor.

64. The system of claim 62 or claim 63, wherein the base editing domain is selected from the group consisting of Adenosine Deaminase Acting on RNA (ADAR) 1 (ADAR1), ADAR2, apolipoprotein B mRNA editing enzyme, catalytic polypeptide-like (APOBEC), and activation-induced cytidine deaminase (AID).

65. The system of any one of claims 1-40, further comprising an RNA-binding fusion polypeptide that comprises an RNA-binding domain and a base-editing domain.

66. The system of claim 65, wherein the base-editing domain is selected from the group consisting of ADAR1, ADAR2, APOBEC, and AID.

67. The system of claim 65 or claim 66, wherein the RNA-binding domain is MS2.

68. A method of modifying an RNA molecule, comprising contacting the RNA molecule with a system according to any one of claims 62-67.

69. A method of detecting a target RNA in a sample, the method comprising:
a) contacting the sample with:
(i) an RNA guide or a nucleic acid encoding the RNA guide, wherein the RNA guide comprises a direct repeat sequence and a spacer sequence capable of hybridizing to the target RNA;
(ii) a Type VI-D CRISPR-Cas effector protein or a nucleic acid encoding the effector protein; and
(iii) a labeled detector RNA;
wherein the effector protein associates with the RNA guide to form a complex;
wherein the RNA guide hybridizes to the target RNA; and wherein upon binding of the complex to the target RNA, the effector protein exhibits collateral RNAse activity and cleaves the labeled detector RNA; and
b) measuring a detectable signal produced by cleavage of the labeled detector RNA,
wherein said measuring provides for detection of the target RNA in the sample.

70. The method of claim 69, wherein the effector protein comprises an amino acid sequence having at least 85% sequence identity to an amino acid sequence provided in Table 2.

71. The method of claim 69 or claim 70, wherein the target RNA is single-stranded.

72. The method of any one of claims 69-71, wherein the target RNA was transcribed from a DNA molecule.

73. The method of any one of claims 69-72, further comprising contacting the sample with an accessory protein comprising at least one WYL domain.

74. The method of claim 73, wherein the accessory protein comprises an amino acid sequence having at least 85% sequence identity to an amino acid sequence provided in any one of Tables 4, 5, and 6.

75. The method of any one of claims 69-74, further comprising comparing the detectable signal with a reference signal and determining the amount of target RNA in the sample.

76. The method of any one of claims 69-75, wherein the measuring is performed using gold nanoparticle detection, fluorescence polarization, colloid phase transition/dispersion, electrochemical detection, and semiconductor based-sensing.

77. The method of any one of claims 69-76, wherein the labeled detector RNA comprises a fluorescence-emitting dye pair, a fluorescence resonance energy transfer (FRET) pair, or a quencher/fluor pair.

78. The method of any one of claims 69-77, wherein upon cleavage of the labeled detector RNA by the effector protein, an amount of detectable signal produced by the labeled detector RNA is decreased.

79. The method of any one of claims 69-78, wherein upon cleavage of the labeled detector RNA by the effector protein, an amount of detectable signal produced by the labeled detector RNA is increased.

80. The method of any one of claims 69-79, wherein the labeled detector RNA produces a first detectable signal prior to cleavage by the effector protein and a second detectable signal after cleavage by the effector protein.

81. The method of any one of claims 69-80, wherein a detectable signal is produced when the labeled detector RNA is cleaved by the effector protein.

82. The method of any one of claims 69-81, further comprising pre-amplify a nucleic acid in the sample prior to the contacting step.

The application's sequence listing, which the Patent Office published only in electronic form, follows.

SEQUENCE LISTING (674 sequences)

SEQ ID NO: 1 - protein, 954 aa, Eubacterium siraeum
MGKKIHARDLREQRKTDRTEKFADQNKKREAERAVPKKDAAVSVKSVSSVSSKKDNVTKSMAKAAGVKSVFAVGNTVYMTSFGRGNDAVLEQKIVDTSHEPLNIDDPAYQLNVVTMNGYSVTGHRGETVSAVTDNPLRRFNGRKKDEPEQSVPTDMLCLKPTLEKKFFGKEFDDNIHIQLIYNILDIEKILAVYSTNAIYALNNMSADENIENSDFFMKRTTDETFDDFEKKKESTNSREKADFDAFEKFIGNYRLAYFADAFYVNKKNPKGKAKNVLREDKELYSVLTLIGKLRHWCVHSEEGRAEFWLYKLDELKDDFKNVLDVVYNRPVEEINNRFIENNKVNIQILGSVYKNTDIAELVRSYYEFLITKKYKNMGFSIKKLRESMLEGKGYADKEYDSVRNKLYQMTDFILYTGYINEDSDRADDLVNTLRSSLKEDDKTTVYCKEADYLWKKYRESIREVADALDGDNIKKLSKSNIEIQEDKLRKCFISYADSVSEFTKLIYLLTRFLSGKEINDLVTTLINKFDNIRSFLEIMDELGLDRTFTAEYSFFEGSTKYLAELVELNSFVKSCSFDINAKRTMYRDALDILGIESDKTEEDIEKMIDNILQIDANGDKKLKKNNGLRNFIASNVIDSNRFKYLVRYGNPKKIRETAKCKPAVRFVLNEIPDAQIERYYEACCPKNTALCSANKRREKLADMIAEIKFENFSDAGNYQKANVTSRTSEAEIKRKNQAIIRLYLTVMYIMLKNLVNVNARYVIAFHCVERDTKLYAESGLEVGNIEKNKTNLTMAVMGVKLENGIIKTEFDKSFAENAANRYLRNARWYKLILDNLKKSERAVVNEFRNTVCHLNAIRNININIKEIKEVENYFALYHYLIQKHLENRFADKKVERDTGDFISKLEEHKTYCKDFVKAYCTPFGYNLVRYKNLTIDGLFDKNYPGKDDSDEQK

SEQ ID NO: 2 - protein, 919 aa, Ruminococcus sp.
MAKKNKMKPRELREAQKKARQLKAAEINNNAAPAIAAMPAAEVIAPVAEKKKSSVKAAGMKSILVSKNKMYITSFGKGNSAVLEYEVDNNDYNQTQLSSKGSSNIELRGVNEVNITFSSKHGFESGVEINTSNPTHRSGESSPVRGDMLGLKSELEKRFFGKTFDDNIHIQLIYNILDIEKILAVYVTNIVYALNNMLSIKDSESYDDFMGYLSARNTYEVFTHPDKSNLSDKAKGNIKKSFSTFNDLLKTKRLGYFGLEEPKTKDTRVSQAYKKRVYHMLAIVGQIRQSVFHDKSSKLDEDLYSFIDIIDSEYRETLDYLVDERFDSINKGFIQGNKVNISLLIDMMKGYEADDIIRLYYDFIVLKSQKNLGFSIKKLREKMLDEYGFRFKDKQYDSVRSKMYKLMDFLLFCNYYRNDVVAGEALVRKLRFSMTDDEKEGIYADEASKLWGKFRNDFENIADHMNGDVIKELGKADMDFDEKILDSEKKNASDLLYFSKMIYMLTYFLDGKEINDLLTTLISKFDNIKEFLKIMKSSAVDVECELTAGYKLFNDSQRITNELFIVKNIASMRKPASSAKLTMFRDALTILGIDDNITDDRISEILKLKEKGKGIHGLRNFITNNVIESSRFVYLIKYANAQKIRKVAKNEKVVMFVLGGIPDTQIERYYKSCVEFPDMNSSLEVKRSELARMIKNISFDDFKNVKQQAKGRENVAKERAKAVIGLYLTVMYLLVKNLVNVNARYVIAIHCLERDFGLYKEIIPELASKNLKNDYRILSQTLCELCDKSPNLFLKKNERLRKCVEVDINNADSSMTRKYRNCIAHLTVVRELKEYIGDIRTVDSYFSIYHYVMQRCITKRENDTKQEEKIKYEDDLLKNHGYTKDFVKALNSPFGYNIPRFKNLSIEQLFDRNEYLTEK

SEQ ID NO: 3 - protein, 981 aa, Unknown
  animal-digestive system-orangutan individual fecal sequence
MGKKIHARDLREQRKNDRTTKFAEQNKKREAQMAVQKKDAAVSAKSVSSVSSKKGNVTKSMAKAAGVKSVFAVGKNTVYMTSFGRGNDAVLEQKIVDTSHEPLNIDDPAYQLNVVTMNGYSVTGHRGETVSAITDNPLRRFNGGKKDKPEQSVPADMLCLKPTLEKKFFGKEFDDNIHIQLIYNILDIEKILAVYSTNAVYALNNTIADENNENWDLFANFSTDNTYGELINAATYKESTDDVSTDDEKRREAEKKKREAKIAEKILADYEKFRKNNRLAYFADAFYIEKNKSKSKSQNKAEGIKRGKKEIYSILALIAKLRHWCVHSEDGRAEFWLYKLDELEDDFKNVLDVVYNRPVEEINDDFVERNKVNIQILHSKCENSDIAELTRSYYEFLITKKYKNMGFSIKKLREIILEGTEYNDNKYDTVRNKLYQMVDFILYRGYINENSERAEALVNALRSTLNEDDKTKLYSSEAAFLKRKYMKIIREVTDSLDVKKLKELKKNAFTIPDNELRKCFISYADSVSEFTKLIYLLTRFLSGKEINDLVTTLINKFDNIRSFLEIMDELGLERTFTDEYSFFEGSTKYLAELIELNSFVKSCSFDMSAKRPMYRDALDILGIESDKSEDDIKRMIDNILQVDANGKKLPNKNHGLRNFIASNVVESNRFEYLVRYGNPKKIRETAKCKPAVRFVLNEIPDAQIERYYKAYYLDEKSLCLANMQRDKLAGVIADIKFDDFSDAGSYQKANATSTKITSEAEIKRKNQAIIRLYLTVMYIMLKNLVNVNARYVIAFHCLERDTKLYAESGLEVGNIEKNKTNLTMAVMGVKLENGIIKTEFDKSLAENAANRYLRNARWYKLILDNLKMSERAVVNEFRNTVCHLNAIRNININIDGIKEVENYFALYHYLIQKHLENRFADNGGSTGDYIGKLEEHKTYCKDFVKAYCTPFGYNLVRYKNLTIDGLFDKNYPGKDDSDKQK

SEQ ID NO: 4 - protein, 1054 aa, Unknown
  arthropoda-digestive system-cubitermes and nasutitermes termite gut sequence
MSQSTKTKAKRMGVKSVLAHGKDEKGHIKLAITAFGKGNKAELAIQTDEKGSNLAKTYKERNITANKIVSEGIQTSGTIAGEGHATFLNNPAEHVGTDYLKLKETLEMEFFGKSFPGDSVRIQIIHQILDIQKLLGIYITDIIYCINNLRDETHLDHESDIVGLSMSNTNVNLALNQMRPYFGFFGEAFRPVGDDKVKEITLSDEVRKNIEKIIALEEQKRNPSTPRFKQENINLEIENAMGKFKSKDAFETAKKKYNRIVADETNAKTLRILGAMRQITAHFKDQATLFMSDVELPKILKKEFSKADWQTVEDYYAKLVDRINEGFCKNAATNVHFLTELLPEESKKQLTEDYFRFAILKEGKNLGVNMKRLREVMFALFVPELTAPETKKRYDSYRAKIYGLTDFLLFKHIHNTKQLEEWVAVLRETSNEDAKENLYDEFARTAWNTVGDSAKQLIENMQSYFTKKEKEITKTAQPVLSTSSIAHTSKKITQFSSFAKLLAFLCNFWEGKEINELLSAYIHKFENIQEFINLLEKLEGKKPQFTENYALFNEAAGQRAGEIAQNLRILASIGKMKPDLGDAKRQLYKAAIEMLGIDTEEYISDEWLEPNMLLAQPPKEPKKDNEKYRKEPHKYSYEKDMETYRKKLREYEETWRSLIDYEYLMPETNPFRNFVAKQVIESRRFMYLVRYTKPKTVRALMSNRAIVHYVLSRIADIQDHHMTESQIDRYYQNLPQYNEQQHKNVSLETKIDALADYLCKYTFEKNVLKQKNGIVLNTKSATKNVEIEHLKALTGLYLTVAYIAVKNLVKANARYYIAFSIFERDYALFEKKLGKDTLEKYVKPFKYIDKGEEKEGKNNFFALTEYLLDKDNSLRYQWNNDLSDEENKQALRKHLDKKEIRSQRHFSQYWLDIFARQIENAKKTSESGYLLTAARNCALHLNVLTALPEFVGEFRKTGDKMTSYFELYHFLLQKLMLAEAGLNLDEYRERIDTYQTACKDLINITYVSLGYNLPRYKNLTCEPLFDEESATGKERQTRLDEKSKEKKQRKGGQK

SEQ ID NO: 5 - protein, 1006 aa, Eubacterium sp.
MSKKQRPKDIRKRQEEEKREKYKKQEELRKKQEELRKEQEQRREDQKELEKIKKEVGEEGEKKKSRAKALGLKSTFILDRDEQKVLMTSFGQGNKAVRDKYIIGDKVSDINDDRKNKKAALLVEVCGKSFNISKKENDDCDPVKVNNPVVSRNKKDDDLIHCRKKLEELYFGEQFKDNIHIQLIYNILDIEKILAVQVNNIVFALNNLLSWSGEEKFDLIGYLGVNDTYEKFRDAKGKRKGLYEKFSTLIEKKRMRYFGSTFYPLNEKGEEITSNDKKEWEQFEKKCYHLLAVLGMMRQATAHGDSKRRAEIYKLGKEFDKSEARGCRQEARKELDDLYRKKIHEMNQSFLKNSKRDILMLFRIYDAESKEAKRKLAQEYYEFIMLKSYKNTGFSIKHLRETVIDKMDEDIKEKIKDDKYNPIRRKLYRIMDFVIYQYYQESEQQEEAMELVRKLRNAETKVEKELTYRKEAEKLKEELEKIIRNSILSVCDRILAEMNEKRHKKVNQESSDTDSEEPLDPEISEGITFIKETAHSFSEMIYLLTVFLDGKEINILLTQLIHCFDNISSFMDTMKEENLLTKLKEDYEIFEESKEISKELRIINSFARMTEPVPKTEKTMFIDAAQILGYSNDEKELEGYVDALLDTKNKTKDKERKGFEKYIWNNVIKSTRFRYLVRYADPKKVRAFAANKKVVAFVLKDIPDEQIKAYYNSCFSQNSDSSSNMSIAFQDGDSNKKGTSVHDMMRKALTEKITGLNFGDFEEESKKGIRREESDKNIIRLYLTVLYLVQKNLIYVNSRYFLAFHCAERDEVLYNGETIDNNKEKGSEKDWKKFAKEFIIEHPPKKKVKDYLAKNFEYSNKWSLRVFRNSVQHLNVIRDAYKYIKCIDDNKDVQSYFALYHYLVQRYISEMAENLTDKGELSEGRLQYYLSQVENYRTYCKDFVKALNVPFAYNLPRYKNLSIDELFDRNNYLPNKAKKWISEKKENGEYVMEDCGNKGAGQVENA

SEQ ID NO: 6 - protein, 1001 aa, Eubacterium sp.
MAKKLRPKELREKRRMAEKEEHKKQEKLRKEQEELRKKQEKQREDQKELEKIKKEEGGEGEKKKSGAKALGLKSTFILDRDEQKMLMTSFGRGNKAVRDKYIIGDKVSDIDDSWENKKAALSVEVCGKSFNISKKENDDCEPVKVNNPVLSGNKKDDDLIHCRKNLEEMYFGQQFKDNIHIQLIYNILDIEKILAVQINNIVFILNNLLRWSGEEEFDLIGSLGVNHTYEEFRGRNKNYGKFSELIKQSQMRYFGSTFCLFNENEERITSENKKEWKRFEKKCYHLLAVLGMMRQATAHGDSKRRAEIYKLGKEFDRLEARGCRPEARKELDELYKKKIHEMNQGFLKNSKSDILMLFRIYNAESKEAKRKLAQEYYEFIMLKSYKNTGFSIKHLRETMIDKMDEDKKEKLKDDKYNPIRRKIYRIMDFMIYQYYQEPEHQEEAEELVRKLRNAEIEAKKELAYRKEAEKLKKELEKIIFNSVLPSCDRILSEMDERRNKKVNQESSDTDKEEPLDSEIAEGITFIKETAHSFSEMIYLLTVFLDGKEINILLTQLIHCFDNISSFMDTMEEENLLTKLKEDYEIFEESKEISRELRIINSFARMTEPVPKTERIMFIEAAQILGYSNGEKELEGYVDALLDTKNKTNDKKKKGFVRYIWNNVIKSTRFRYLVRYADPKKVRAFAANKKVVAFVLKDIPDDQIRAYYNSCFRQNSDSSSNNSNASWDADSNKRDISVSDMRKALTEKITGLNFGDFEEESKKGIRKEESDKNIIRLYLTVLYLVQKNLIYVNSRYFLAFHCAERDEMLYNGETIDNNKEKGSEKDWRKFAKQFIMEHSPKKKVKDYLAKNFEYSNKWSLKEFRNSVQHLNVIRDAHKYIKYINDNKDVQSYFALYHYLVQRYISERAANRTDKESLSEGRLQYYLSQVKEYRTYCKDFVKALNVPFAYNLPRYKNLSIDELFDRNNYLPNKAKKWIPEKKENGEYVMEDCGNKDAGQVENA

SEQ ID NO: 7 - protein, 906 aa, Unknown
  gut metagenome sequence
MEREVKKPPKKSLAKAAGLKSTFVISPQEKELAMTAFGRGNDALLQKRIVDGVVRDVAGEKQQFQVQRQDESRFRLQNSRLADRTVTADDPLHRAETPRRQPLGAGMDQLRRKAILEQKYFGRTFDDNIHIQLIYNILDIHKMLAVPANHIVHTLNLLGGYGETDFVGMLPAGLPYDKLRVVKKKNGDTVDIKADIAAYAKRPQLAYLGAAFYDVTPGKSKRDAARGRVKREQDVYTILSLMSLLRQFCAHDSVRIWGQNTPAALYGLQALPQDMKDLLDDGWRRALGGVNDHFLDTNKVNLLTLFEYYGAETKQERVALTQDFYRFVVLKEQKNMGFSLRRLREELLKLPDAAYLTGQEYDSVRQKLYMLLDFLLCRLYAQERADRCEELVSALRCALSDEEKDAVYQAEAAALWQALGDTLRRELLPLLKGKKLQDKDKKKLDELGLSRDVLDGVLFRPAQQGSRANADYFCRLMHLSTWFMDGKEINTLLTTLISKLENIDSLRSVLESMGLAYSFVPAYAMFDHSRYIAGQLRVVNNIARMRKPAIGAKREMYRAAVVLLGVDSPEAAAAITDDLLQIDPETGKVRPRGDSARDTGLRNFVANNVVESRRFTYLLRYMTPEQARVLAQNEKLIAFVLSTVPSAQLERYCRTCGREDITGRPAQIRYLTAQIMGVRYESFTDVEQRGRGDNPKKERYKALIGLYLTVLYLAVKNMVNCNARYVIAFYCRDRDTALYQKEVCWYDLEEDKKSGKQRQVEDYTALTRYFVSQGYLNRHACGYLRSNMNGISNGLLAAYRNAVDHLNVIPPLGSLCRDIGRVDSYFALYHYAVQQYLNGRYYRKTPREQELFAAMAQHRTWCSDLVKALNTPFGYNLARYKNLSIDGLFDREGDHVVREDGEKPAE

SEQ ID NO: 8 - protein, 925 aa, Unknown
  gut metagenome sequence
MAKKNKMKPRELREAQKKARQLKAAEIKNNAVPAIAAMPAAEAAAPAVEKKKSSVKAAGMKSILVSENKMYITSFGKGNSAVLEYEVDKVDNNNYNKTQLSSKDNSNIELGDVNEVNITFSSKRGNESGVEINTSNPTHRSGESSPVRWDMLGLKSELEKRFFGKTFDDNIHIQLIYNILDIEKILAVYVTNIVYALNNMLGIKGSESYDDFMGYLSARNTYEVFTHPDKSNLSDKVKGNIKKSLSKFNDLLKTKRLGYFGLEEPKTKDTRVSQAYKKRVYHMLAIVGQIRQCVFHDKSGAKRFDLYSFINNIDPEYRDTLDYLVEERLKSINKDFIEGNKVNISLLIDMMKGYEADDIIRLYYDFIVLKSQKNLGFSIKKLREKMLEEYGYRFKDKQYDSVRSKMYKLMDFLLFCNYYRNDVVAGEALVRKLRFSMTDDEKEGIYADEASKLWGKFRNDFENIADHMNGDVIKELGKADMDFDEKILDSEKKNASDLLYFSKMIYMLTYFLDGKEINDLLTTLISKFDNIKEFLKIMKSSAVDVECELTAGYKLFNDSQRITNELFIVKNIASMRKPAASAKLTMFRDALTILGIDDKITDDRISEILKLKEKGKGIHGLRNFITNNVIESSRFVYLIKYANAQKIREVAKNEKVVMFVLGGIPDTQIERYYKSCVEFPDMNSSLEAKRSELARMIKNIRFDDFKNVKQQAKGRENVAKERAKAVIGLYLTVMYLLVKNLVNVNARYVIAIHCLERDFGLYKEIIPELASKNLKNDYRILSQTLCELCDDRDESPNLFLKKNKRLRKCVEVDINNADSSMTRKYRNCIAHLTVVRELKEYIGDIRTVDSYFSIYHYVMQRCITKREDDTKQEEKIKYEDDLLKNHGYTKDFVKALNSPFGYNIPRFKNLSIEQLFDRNEYLTEK

SEQ ID NO: 9 - protein, 923 aa, Unknown
  gut metagenome sequence
MAKKNKMKPRELREAQKKARQLKAAEINNNAVPAIAAMPAAEVIAPAAEKKKSSVKAAGMKSILVSENKMYITSFGKGNSAVLEYEVDKVDDNDYNKTQLSSKDNSNIELGNVNEVNITFSSRRGFESGVEINTSNPTHRSGESSSVRGDMLGLKSELEKRFFGKTFDDNIHIQLIYNILDIEKILAVYVTNIVYALNNMLGVKGSESYDDFMGYLSAQNTYYIFTHPDKSNLSDKVKGNIKKSLSKFNDLLKTKRLGYFGLEEPKTKDKRVSEAYKKRVYHMLAIVGQIRQSVFHDKSNELDEYLYSFIDIIDSEYRDTLDYLVDERFDSINKGFIQGNKVNISLLIDMMKDDYEADDIIRLYYDFIVLKSQKNLGFSIKKLREKMLEEYGFRFKDKQYDSVRSKMYKIMDFLLFCNYYRNDVVAGEALVRKLRFSMTDDEKEGIYADEAAKLWGKFRNDFENIADHMNGDVIKELGKADMDFDEKILDSEKKNASDLLYFSKMIYMLTYFLDGKEINDLLTTLISKFDNIKEFLKIMKSSAVDVECELTAGYKLFNDSQRITNELFIVKNIASMRKPAASAKLTMFRDALTILGIDDNITDDRISEILKLKEKGKGIHGLRNFITNNVIESSRFVYLIKYANAQKIREVAKNEKVVMFVLGGIPDTQIERYYKSCVEFPDMNSSLEVKRSELARMIKNICFDDFKNVKQQAKGRENVAKERAKAVIGLYLTVMYLLVKNLVNVNARYVIAIHCLERDFGLYKEIVSELASKNLKNDYRILSQTLCELCDKSPNLFLKKNERLRKCVEVDINNADSSMTRKYRNCIAHLTVVRELKEYIGDIRAVDSYFSIYHYVMQRCITKRGNDTKQEDKIKYEDDLLKNHGYTKDFVKALNSPFGYNIPRFKNLSIEQLFDRNEYLTEK

SEQ ID NO: 10 - protein, 906 aa, Unknown
  gut metagenome sequence
MEREVKKPPKKSLAKAAGLKSTFVISPQEKELAMTAFGRGNDALLQKRIVDGVVRDVAGEKQQFQVQRQDESRFRLQNSRLADRTVTADDPLHRAETPRRQPLGAGMDQLRRKAILEQKYFGRTFDDNIHIQLIYNILDIHKMLAVPANHIVHTLNLLGGYGETDFVGMLPAGLPYDKLRVVKKKNGDTVDIKADIAAYAKRPQLAYLGAAFYDVTPGKSKRDAARGRVKREQDVYAILSLMSLLRQFCAHDSVRIWGQNTTAALYHLQALPQDMKDLLDDGWRRALGGVNDHFLDTNKVNLLTLFEYYGAETKQARVALTQDFYRFVVLKEQKNMGFSLRRLREELLKLPDAAYLTGQEYDSVRQKLYMLLDFLLCRLYAQERADRCEELVSALRCALSDEEKDTVYQAEAAALWQALGDTLRRKLLPLLKGKKLQDKDKKKSDELGLSRDVLDGVLFRPAQQGSRANADYFCRLMHLSTWFMDGKEINTLLTTLISKLENIDSLRSVLESMGLAYSFVPAYAMFDHSRYIAGQLRVVNNIARMRKPAIGAKREMYRAAVVLLGVDSPEAAAAITDDLLQIDPETGKVRPRSDSARDTGLRNFIANNVVESRRFTYLLRYMTPEQARVLAQNEKLIAFVLSTVPDTQLERYCRTCGREDITGRPAQIRYLTAQIMGVRYESFTDVEQRGRGDNPKKERYKALIGLYLTVLYLAVKNMVNCNARYVIAFYCRDRDTALYQKEVCWYDLEEDKKSGKQRQVEDYTALTRYFVSQGYLNRHACGYLRSNMNGISNSLLTAYRNAVDHLNAIPPLGSLCRDIGRVDSYFALYHYAVQQYLNGRYYRKTPREQELFAAMAQHRTWCSDLVKALNTPFGYNLARYKNLSIDGLFDREGDHVVREDGEKPAE

SEQ ID NO: 11 - protein, 929 aa, Unknown
  gut metagenome sequence
MAKKNKMKPRELREAQKKARQLKAAEINNNAAPAIAAMPAAQVIAPAAEKKKSSVKAAGMKSILVSENKMYITSFGKGNSAVLEYEVDKVDNNNYNKTQLSSKDNSNIELGDVNEVNITFSSKHGFESGVEINTSNPTHRSGESSPVRWDMLGLKSELEKRFFGKTFDDNIHIQLIYNILDIEKILAVYVTNIVYALNNMLGIKGSESYDDFMGYLSARNTYEVFTHPDKSNLSDKVKGNIKKSFSTFNDLLKTKRLGYFGLEEPKTKDTRVSEAYKKRVYHMLAIVGQIRQCVFHDLSEHSEYDLYSFIDNSKKVYRECRETLNYLVDERFDSINKGFIQGNKVNISLLIDMMKDDYEADDIIHLYYDFIVLKSQKNLGFSIKKLREKMLDEYGFRFKDKQYDSVRSKMYKLMDFLLFCNYYRNDVVAGEALVRKLRFSMTDDEKEGIYADEAEKLWGKFRNDFENIADHMNGDVIKELGKADMDFDEKILDSEKKNASDLLYFSKMIYMLTYFLDGKEINDLLTTLISKFDNIKEFLKIMKSSAVDVECELTAGYKLFNDSQRITNELFIVKNIASMRKPAASAKLTMFRDALTILGIDDKITDDRISEILKLKEKGKGIHGLRNFITNNVIESSRFVYLIKYANAQKIREVAKNEKVVMFVLGGIPDTQIERYYKSCVEFPDMNSSLKVKRSELARMIKNIRFDDFKNVKQQAKGRENVAKERAKAVIGLYLTVMYLLVKNLVNVNARYVIAIHCLERDFGLYKEIIPELASKNLKNDYRILSQTLCELCDDRDESPNLFLKKNRRLRKCVEVDINNADSSMTRKYRNCIAHLTVVRELKEYIGDIRTVDSYFSIYHYVMQRCITKREDDTKQEEKIKYEDDLLKNHGYTKDFVKALNSPFGYNIPRFKNLSIEQLFDRNEYLTEK

SEQ ID NO: 12 - protein, 919 aa, Unknown
  human metagenome sequence
MAKKNKMKPRELREAQKKARQLKAAEINNNAAPAIAAMPAAEVIAPAAEKKKSSVKAAGMKSILVSENKMYITSFGKGNSAVLEYEVDNNDYNKTQLSSKDSSNIELRGVNEVNITFSSKHGFGSGVEINTSNPTHRSGESSPVRWDMLGLKSELEKRFFGKTFDDNIHIQLIYNILDIEKILAVYVTNIVYALNNMLGIKKSESHDDFMGYLSAKNTYDVFTNPNGSTLSDDKKKNIRKSLRKFNDLLKTKRLGYFGLEEPKTKDTRVSQAYKKRVYHMLAIVGQIRQSVFHDKSSKLHEDLYSFIDIIDSEYRETLDYLVDERFDSINKGFIQGNKVNISLLIDMMKGYEADDIIRLYYDFIVLKSQKNLGFSIKKLREKMLDEYGFRFKDKQYDSVRSKMYKLMDFLLFCNYYRNDVAAGEALVRKLRFSMTDDEKEGIYADEAAKLWGKFRNDFENIADHMNGDVIKELGKADMDFDEKIIDSEKKNASDLLYFSKMIYMLTYFLDGKEINDLLTTLISKFDNIKEFLKIMKSSAVDVECELTAGYKLFNDSQRITNELFIVKNIASMRKPAASAKLTMFRDALTILGIDDNITDDRISEILKLKEKGKGIHGLRNFITNNVIESSRFVYLIKYANAQKIRKVAKNEKVVMFVLGGIPDTQIERYYKSCVEFPDMNSSLEVKRSELARMIKNISFDDFKNVKQQAKGRENVAKERAKAVIGLYLTVMYLLVKNLVNVNARYVIAIHCLERDFGLYKEIIPELASKNLKNDYRILSQTLCELCDKSPNLFLKKNRRLRKCVEVDINNADSSMTRKYRNCIAHLTVVRELKEYIGDIRTVDSYFSIYHYVMQRCITKRENDTKQEEKIKYEDDLLKNHGYTKDFVKALNSPFGYNIPRFKNLSIEQLFDRNEYLTEK

SEQ ID NO: 13 - protein, 924 aa, Unknown
  human metagenome sequence
MAKKNKMKPRELREAQKKARQLKAAEINNNAAPAIAAMPAAEVIAPAAEKKKSSVKAAGMKSILVSENKMYITSFGKGNSAVLEYEVDNNDYNKTQLSSEDSSNIELCGVNKVNITFSSKHGFESGVEINTSNPTHRSGESSPVRWDMLGLKSELEKRFFGKTFDDNIHIQLIYNILDIEKILAVYVTNIVYALNNMLGEGDESNYDFMGYLSTFNTYKVFTNPNGSTLSDDKKENIRKSLSKFNALLKTKRLGYFGLEEPKTKDTNALEAYKKRVYYMLAIVGQIRQCVFHDLSEHSEYDLYSFIDNSKKVYRECRETLDYLVDERFDSINKGFIQGNKVNISLLIDMMKGYEADDIIRLYYDFIVLKSQKNLGFSIKKLREKMLDEYGFRFKDKQYDPVRSKMYKLMDFLLFCNYYRNDVVAGEALVRKLRFSMTDDEKEGIYADEAAKLWGKFRNDFENIADHMNGDVIKELGKADMDFDEKILDSEKKNASDLLYFSKMIYMLTYFLDGKEINDLLTTLISKFDNIKEFLKIMKSSAVNVECELTAGYKLFNDSQRITNELFIVKNIASMRKPAASAKLTMFRDALTILGIDDKITDDRISEILKLKEKGKGIHGLRNFITNNVIESSRFVYLIKYANAQKIREVAKNEKVVMFVLGGIPDTQIERYYKSCVEFPDMNSSLEAKRSELARMIKNISFDDFKNVKQQAKGRENVAKERAKAVIGLYLTVMYLLVENLVNVNARYVIAIHCLERDFGLYKEIISELASKNLKNDYRILSQTLCELCDNCDESPNLFLKKNERLRKCVEVDINNADSNMTRKYRNCIAHLTVVRELNKYIKDIRTVDSYFSIYHYVMQRCITKREDDKKQEEKIKYEDDLLKNHGYTKDFVKALNSPFGYNIPRFKNLSIEQLFDRNEYLTEK

SEQ ID NO: 14 - protein, 922 aa, Unknown
  human gut metagenome sequence
MAKKNKMKPRELREAQKKARQLKAAEINNNAAPAIAAMPAAEAAAPAAEKKKSSVKAAGMKSILVSENKMYITSFGKGNSAVLEYEVDNNDYNKTQLSSKDNSNIELGDVDEVNITFSSKHGFGSGVEINTSNPTHRSGESSPVRWDMLGLKSELEKRFFGKTFDDNIHIQLIYNILDIEKILAVYVTNIVYALNNMLGEGGDESHDDIMGYLSAKNTYDVFTDPDESDLSKNIKGNIKKSLSKFNDLLKTKRLGYFGLEEPKTKDKRASEAYKKRVYHMLAIVGQIRQSVFHDKSNELDEYLYSFIDIIDSEYRDTLDYLVDERFDSINKGFIQGNKVNISLLIDMMKGYEADDIIRLYYDFIVLKSQKNLGFSIKKLREKMLDEYGFRFKDKQYDSVRSKMYKLMDFLLFCNYYRNDVIAGEALVRKLRFSMTDDEKEGIYADEAAKLWGKFRNDFENIADHMNGDVIKELGKADMDFDEKILDSEKKNASDLLYFSKMIYMLTYFLDGKEINDLLTTLISKFDNIKEFLKIMKSSAVDVECELTAGYKLFNDSQRITNELFIVKNIASMRKPAASAKLTMFRDALTILGIDDNITDDRISEILKLKEKGKGIHGLRNFITNNVIESSRFVYLIKYANAQKIREVAKNEKVVMFVLGGIPDTQIERYYKSCVEFPDMNSSMGAKRRELAKMIKSISFEDFKDVKQQAKGRENVAKERAKAVIGLYLTVMYLLVKNLVNVNARYVIAIHCLERDFGLYKEIIPELASKNLKNDYRILSQTLCELCDNGDESPNLFLKKNKRLRKCVEVDINNADSNMTRKYRNCIAHLTVVRELNKYIKDIRTVDSYFSIYHYVMQRCITKRENDTKQEEKINYEDDLLKNHGYTKDFVKALNSPFGYNIPRFKNLSIEQLFDRNEYLTEK

SEQ ID NO: 15 - protein, 923 aa, Unknown
  gut metagenome sequence
MFMAKKNKMKPRERREAQKKARQLKAAEINNNAVPAIAAMHAAEVIAPAAEKKKSSVKAAGMKSILVSENKMYITSFGKGNSAVLEYEVDNNDYNQTQLSSKDNSNIELCGVTKVNITFSSKHGFESGVEINTSNPTHRSGESSPVRGDMLGLKSELEKRFFGKTFDDNIHIQLIYNILDIEKILAVYVTNIVYALNNMLGEGDESNYDFMGYLSTFNTYKVFTNPNGSTLSDDKKENIRKSLSKFNALLKTKRLGYFGLEEPKTKDTRASEAYKKRVYHMLAIVGQIRQCVFHDKSGAKRFDLYSFINNIYPEYRDTLDYLVEERLKSINKDFIQGNKVNISLLIDMMKGYEADDIIRLYYDFIVLKSQKNLGFSIKKLREKMLDEYGFRFKDKQYDSVRSKMYKLMDFLLFCNYYRNDVVAGEALVRKLRFSMTDDEKEGIYADEAAKLWGKFRNDFENIADHMNGDVIKELGKADMDFDEKILDSEKKNASDLLYFSKMIYMLTYFLDGKEINDLLTTLISKFDNIKEFLKIMKSSAVDVECELTAGYKLFNDSQRITNELFIVKNIASMRKPAASAKLTMFRDALTILGIDDKITDDRISEILKLKEKGKGIHGLRNFITNNVIESSRFVYLIKYANAQKIREVAKNEKVVMFVLGGIPDTQIERYYKSCVEFPDMNSSLEAKRSELARMIKNISFDDFKNVKQQAKGRENVAKERAKAVIGLYLTVMYLLVKNLVNVNARYVIAIHCLERDFGLYKEIIPELASKNLKNDYRILSQTLCELCDDRDESPNLFLKKNKRLRKCVEVDINNADSSMTRKYRNCIAHLTVVRELKKYIGDIRTVDSYFSIYHYVMQRCITKREDDTKQEEKIKYEDDLLKNHGYTKDFVKALNSPFGYNIPRFKNLSIEQLFDRNEYLTEK

SEQ ID NO: 16 - protein, 963 aa, Unknown
  mammals-digestive system-asian elephant fecal-elephas maximus sequence
MYNIDKLWLTHILFVSLTAGKKNETILEQEINKDSNKKNILVNPTKFDANIKEVRMVSIKPEKYNETVVNNPYYVKDGQVVGQDYLGIKDKLEDTFFGKTYDDNIHIQIAYKLLDIRKIMGMSVGSAVFSLNNLQQRPVGENPNDIVGQIKTDTSFDEIPDNYAKADKDFIDILLDYTRYFDNVFEKQSISVDDKTKDILNNLKECETVSVKTVGTIDRINKNDPNNNNYTIFKIGGLKIKLKGILSNVDVGTKLNIEGQIRRNNDYRDKKGKLCRSYSLLTGAKYSISHEVYNPDTYTFNYDILRLVSYLRQAVVHNNNDDYIDWLYSIDNKKETKDILNAANKVFESQLEAFNKDFNANAQKNVYMIASVLNDSPKTMFKEEIKDIYEKYYNFVLFKENRNVGINLRNIRNNIFYEDIKPNYDEKELSRERAKINTLLDYFIYQDFNNNEKLAEDVIARLQPTKQEVDKVQVYADVTKEFKVRNPKLVDRILSTVKNTIEAKIENFIPDNCVPSSSIKVSSLAKYVYVLAKFLDTKEVNNLLTSLINSFENIGSLVKVLKDEKGYSIYKDRFALLNQKNPFDLANDFILVKNLATMKTKLAKANVKDVKNKVGKRLYCSAINLFKDKNDEVILDNQEFEDIMSEFSSNVGNKKNRRGTAGSKIRNFLINNVIDSRRFYFIIKYYDTRRCHEIIQNENLVRFILGREDMPTDQLIRYYKTITGNECNNRNQIIDTLVKKLKEVSFRKLLLKGERLKEIGNDQDNQEVESLKSLIGLYLTICYLIVKGIVNVNSVYLLAWSAYERDMYYLYNEDMEDKNTNHDYLKAATDFYNNKSCYQKRHKYLIKDIEEARQNSNNLNYKDYRNKVCHYNICTSFMDYANNIGKVSCYFDIYNYCFQRYFAKKNDNLSTLLDTYNCYNKDYLKLLNMPFAYNMARYKNLTIADLFNDKYPSENKEATASND

SEQ ID NO: 17 - protein, 1057 aa, Unknown
  mammals-digestive system-asian elephant fecal-elephas maximus sequence
MEETKVTKETTIEKQSTKRHKQKSKKTATKMSGLKSALVINNHEMLLTSFGKGNNAIAEKRYILDGDIETINNKNKKFDANNDSKVVVIKGISNPNGQLTNPLFDQSPTAIQPNRTSGNDMIGIRRMLERKYFVHNEENKEFQDNIRIQIAYCILDIEKILMPHINNICFEINNMLRLEGYQEDSFMGSFNLYKPYDAFIATTDDKESSRRDNFAKLMTSKQVRYLGNALYSDSLSNLTKDEILDGKRSKELKKYYQELCLLGMVRQSMIHSNQFNSSIYTLDSSYDSTMNTAELLGKGDDSSLVALATDARVEARAILDEIYKKGVDSINNSFLSNSINDLENLFKIYKCDSSEKKTELIKQYYDFCIRKPQMNMGFSITTIREGMFTRCSEANTLLLCDEGSTVKLNVHDTMKSKFYKNLDFMIYKYYKYENPEKGEKLIEDLRSKIKGKKKEDEDKKQRYAEESACILKAKRDIIKKDLTEAANKDLFADLVKSNKNEKQKFKNEYEELLKPFMIPVKVDYFSELIYLVTRFLSGKEINDLLTQLINKFENIAAFIRMYQNDQGKLEFTANYKMFEIDPQKDIPKDGKRVLSGSAKIAYYLRTINYIARMESFEIKSDKTAINDAISLLGYNSNEHRDEFITYTMAKHVVDKYQNTDYQKIVKDFLSANKTLDCKSKNMQAFVSELKNAHLSENYEQREKEIYELADTNLPAYFSEEDKEKLARYIVHSDGTYKKFLKESFYAIEELPNEGFRNFISNNVINSRRFNYIMRFCNPEKIANIGKNKVLISFALSSLAEKTDMIAKYYRVFCDRIDDQKTMEDYLVNKLTKISYTEFLNVNQKANAEKNKEKDRSQKLIGLYITLLYEIVKNLVNINSRYNIAFQRCDNDSIMILQGQYDERAVQESKLTKKFISNQKLNSYSCRYLTHNISQLDRCNDFIRQYRNKVAHLEVVSNIDEYLSGIKHIESYYALYHYLMQKCLLKNYRIEDHSQNEYKNLNDFSSKLDKHGTYVKDFVKALNVPFGYNLPRYKNLSIDELFDRNKLKTGGTIEMKGE

SEQ ID NO: 18 - protein, 977 aa, Unknown
  mammals-digestive system-feces sequence
MKERIDMIEKKKSYAKGMGLKSTLVSDSKVYMTSFGNGNDARLEKVVENNAISCLVDKKEAFVAEITDKNAGYKIINKKFGHPKGYDVVANNPLYTGPVQQDMLGLKETLEKRYFGSSVSGNDNICIQVIHNILDIEKILAEYITNAAYAVNNIAGLDKDIIGFGKFSTVYTFDEFAEPDRHKERFIKDGKLDTKLINQLKNQYDEFDAFLDDTRFGYFGKAFFCKEGDKYLNKQDNERYHILALLSGLRNWVVHNNEVESKIDRKWLYNLDKNLDKEYITTLDYMYSDIADELTKSFSKNSAANVNYIAEILNIDSKTFAEQYFRFSIMKEQKNLGFTLTKLRECMLDREELSDIRDNHKVFDSIRSKLYTMMDFVIYRYYIEEAKKIENENKTLSDDKKKLSEKDIFIISLRGSFSEEQKDKLYSDEAERLWAKLGKLMLEIKKFRGQMTRDYKKSDTPTLNRILPESEDVSTFSKLMYALTMFLDGKEINELLTTLINKFDNIQSMLKIMPLIGVNAKFSSDYAFFNNSEKIADELKLIKSFARMGEPVANAKRDMMIDAIKILGTDLDDNEIKKLADSFFKDSNGKLLHKGKHGMRNFIINNVVNNKRFHYIIRYGDPAHLHEIAKNEVVVRFVLGRIADIQKKQGKGGKNQIDRYYEICIGNGYGKSVSEKIDALTKVIINMNYDQFEAKRKVIENTGRDNAEREKYKKIISLYLTVIYQILKNLVNVNSRYVIGFHCVERDAQLYKEKGYDINTNNLESKGFTSVTKLCVGIADDDPVKYKNVEIELKERALASFDALEKENPELYEKYNMYSEKQKEAELEKQINREKAKTALNAHLRNTKWNVIIRENIRNTEKDACKQFRNKADHLEVARYAYKYINDISEVNSYFQLYHYIMQRIIIDSSGNNANGMIKKYYESVISDKKYNDRLLKLLCVPFGYCIPRFKNLSIEALFDKNEAAKYDKIKKKVAVR

SEQ ID NO: 19 - protein, 971 aa, Unknown
  mammals-digestive system-feces sequence
MIEKKKSYAKGMGLKSTLVSDSKVYMTSFGNGNDARLEKVVENNAISCLVDKKEAFVAEITDKNAGYKIINKKFGHPKGYDVVANNPLYTGPVQQDMLGLKETLEKRYFGSSVSGNDNICIQVIHNILDIEKILAEYITNAAYAVNNIAGLDKDIIGFGKFSTVYTFDEFAEPDRHKERFIKDGKLDTKLINQLKNQYDEFDAFLDDTRFGYFGKAFFCKEGDKYLNKQDNERYHILALLSGLRNWVVHNNEVESKIDRKWLYNLDKNLDKEYITTLDYMYSDIADELTKSFSKNSAANVNYIAEILNIDSKTFAEQYFRFSIMKEQKNLGFTLTKLRECMLDREELSDIRDNHKVFDSIRSKLYTMMDFVIYRYYIEEAKKIENENKTLSDDKKKLSEKDIFIISLRGSFSEEQKDKLYSDEAERLWAKLGKLMLEIKKFRGQMTRDYKKSDTPTLNRILPESEDVSTFSKLMYALTMFLDGKEINELLTTLINKFDNIQSMLKIMPLIGVNAKFSSDYAFFNNSEKIADELKLIKSFARMGEPVANAKRDMMIDAIKILGTDLDDNEIKKLADSFFKDSNGKLLHKGKHGMRNFIINNVVNNKRFHYIIRYGDPAHLHEIAKNEVVVRFVLGRIADIQKKQGKGGKNQIDRYYEICIGNGYGKSVSEKIDALTKVIINMNYDQFEAKRKVIENTGRDNAEREKYKKIISLYLTVIYQILKNLVNVNSRYVIGFHCVERDAQLYKEKGYDINTNNLESKGFTSVTKLCVGIADDDPVKYKNVEIELKERALASFDALEKENPELYEKYNMYSEKQKEAELEKQINREKAKTALNAHLRNTKWNVIIRENIRNTEKDACKQFRNKADHLEVARYAYKYINDISEVNSYFQLYHYIMQRIIIDSSGNNANGMIKKYYESVISDKKYNDRLLKLLCVPFGYCIPRFKNLSIEALFDKNEAAKYDKIKKKVAVR

SEQ ID NO: 20 - protein, 900 aa, Unknown
  mammals-digestive system-feces sequence
MSTKKRFRYSVAAKAAGLKSSLAVDTDRTVMTSFGHGNAAILEKEIVDGEISVLNIENPAFDAVINDKKYALTGHHAGVHALVDQPQNRSDAVHIRGALEKKYFGDTFADNIHVQIAYNILDITKILTVYANNVVYALNNLVHADDDTQADELDSLGNFSAGTSYAKSKSKSKSKQQDFVELFIKKKEIHGYFGDTFAFLDKRIADADKEKQVYAMLACLGSLRQACSHYRIRYSVNGKNVDADADTWLFSSAQLDQTDPLFSEMLNRIYSHKIKTVNQNFFENNRKANFPILKKMYPETTLKVLMNEYYDFSIRKGYKNFGFSIKSLREALLSPQYESLIGVQIKDNKEYDTVRSKLYQLFDFALTRYFNQHPDMVDAFVVELRSLAKDEDAKNAVYEKYAKAVWNDVKQPIAVMLSYMNGSAIKNIKAFELKPDQKELNGIMNSNALDVPHFCKLVYFLTRFLDGKEINDLLTTLVNKFDNIHSFNQVLTALGLSASYEADYKIFEDSGRVVEYLREINSFARMTVDMEKIKRSAYKKALLILGSSKYSDEDLDARVDEMLGVDYNQNGEKIKVRVDTGFRNFIANNVVESSRFHYLIRYCHPRKIRNLAGNAALIEYQLRRLPELQILRYYEACTEPIKRTARTMDEKIGTLIDLIVKMDFSQFEDVQQNDRVRVFSDAEKKEKIRKMREKQRYQSIISLYLTMLYLIVKNLVNINARYVMAFQAWERDNYLLLQLSGKEAEAEYLNLTRHFIEPLDGAKPYLKKRPVEYLKKDMAMVGNSSIRHFRNATVHLNVIMEAHRYTKDIKYIGSYYALYHYILQRHLLDKIEEDSYAEKTVSEKLWESQISQYGTYSKDFVKALCCPFGYNLPRFKNLSIEQLFDRNESKEITDATAPRQ

SEQ ID NO: 21 - protein, 927 aa, Unknown
  mammals-digestive system-feces sequence
MAKKKKAKQRREEQEAARMNKIQSAVKAKAETAPAVSSAFVEKRKDKQSKKTFAKASGLKSTLAVDNSAVMTVFGRGNEAKLDHRINADLQSESLHPQAALKNVHAPNKQKIHFIGRMQDMNLTADHPLHSHDGERAVGADLLCAKDKLEQLYFGRTFNDNIHIQLIYQILDIQKILALHANNIIFALDNLLHKKNDELSDDFVGMGRMRATIGYDAFRNSTNQKVQETYREFQEFVRRKELLYFGSAFYNGDTRRDEKVIYHILSLAASVRQFCFHNDYTSDDGKGFIKADWMYRLEEALPAEYKDTLDALYLEGVEGLDQSFLKNNTVNIQILCSIFNHDDPNKIAEEYYGFLMTKEYKNMGFSIKKLRECMLELPELSGYKEDQYNSVRSKLYKLFDFIIAHYFRKHPEKGEEMVDCLRLCMTEDEKDSHYEGTAKKLVRELAYDMQEAAEQANGSNITQMQKNEQQGKTKGMFAIRDEIRVSRKPVSYFSKVIYVMTLLLDGKEINDLLTTLINKFENIVSFEDVLRQLNVDCTFKPEFAFFGYDRCRNISGELRLINSFARMQKPSAKAKHVMYRDALRILGLDNGMSEEALDQEVRRILQIGADGKPIKNANKGFRNFIASNVIESSRFRYLVRYNNPHKTRMIAQNEAIVRFVLSEIPDEQIRRYYDVCRDPKLPRSSSREAQVDILTGIITDVNYRIFEDVPQSKKINKDRPDANDRMTLKKQRYQAIVSLYLTVMYLVTKNLVYVNSRYVMAFHALERDAYLYGITNIKGDYRKLTDNLLADENYKKFGHFKNKKWRGIAEQNLRNSDVPVIKSFRNMAAHISVIRNIDLYIGDIQKVDSYFALYHFLMQKLIQRVVPENTKGLSDQTKKYYDALEQYNTYCKDFVKAYCTPFAYVTPRYKNLTIDGLFDRNRPGEDK

SEQ ID NO: 22 - protein, 1141 aa, Unknown
  mammals-digestive system-feces sequence
MGVEKNKVFESVIMNFDQERKYGFIEYKETNNLFFHMENVKNPKEIVKGAKVRFEIYENPKPKKQNQRFSAINVEVITDETHKEAKIQKNEFKTFDQFTKELQETQKVNGETKKEHITKNKHTNVKAAGVKSVFAVDDGNVLITSFGRGNAADIETLKSDDDKTINLTETENQKKYVVTNKRSNVKGLADNPTKVESIIPGETQIGFKSILEKHFFGRTFNDNIHIQIIHNILDIKKILAVHTNNIVYALDNIHERGRENSAEKPIDMIGAGGISTSKEYEQYCSEKSDYEDNFLKQLINNERIAYFGNAFFKDEGNKKVMRTEKEIYYILGMLNEVRNVSTHFTEEDNRDWAKANLYNLSNRLKVGSKEVLNQLYKEKIDKIDANGFVNKGCKRDFSILFKSLNLTTDKDKGELVVGFYDFSIRKNYKNIGFSIKTLREYMLKISNSTLCADTISNNAIRPKAYKLYDFIIWHYYMNKPDKINDFVEKLRTQNKNDEKIKLYYDEAVCLLSELGREIHTMTSCVHNIENTSYEITDKKQKEYYKMQINSLNSADKVSDFSKVIYLVTLFLDGKEINDLLTTLINKFDNIASLLSVLEKQSGKKVEFVENYSFFNSSNLLKEKTLNKSENYTCKIVEELREINSFARMTGDCKIRKSAFEDASQLLGYHDKTVNNLFEVLRLKELESKDWKKRTDDEQQEYDRLLNKHHYFKSGKKLPDTGLRNFIINNVIESRRFNYIVRYADPKKIRKCTENNELLKFAFKDVPDSQVDRYYNICVTNKITNATREEKIERLVDIIKSMNLSKVATVKQRDKQDNVEKQKQLAIMSLYLNILYQIAKNLVYVNSRYVMAFHSLERDSQMLFDAYYDVKRGYCDLSTVLLFGVDDLQNRNRGSYKYLRDNRRSNKDVIETFGDFKGKVSKVVEKKNQGLTNEIYDSLCNVAGTTKTEVQNEIKSILKSNGLDESASSYLSHKLVNKVHSYKYLKQNLDCADNTMINQFRNNVAHLNTIRNMDGIENVTGITSYFQIYHYLMQKALYKEFKKCRENAVRKWIPYITENAEPKYVYWNKKEQQEVEVSFNPKIFGYMENIKNHSNTYCKDFVKALCAPFAYNLPRFKNLSIEELFDMHELSEEPKESMKLTD

SEQ ID NO: 23 - protein, 944 aa, Ruminococcus albus
MAKKSKGMSLREKRELEKQKRIQKAAVNSVNDTPEKTEEANVVSVNVRTSAENKHSKKSAAKALGLKSGLVIGDELYLTSFGRGNEAKLEKKISGDTVEKLGIGAFEVAERDESTLTLESGRIKDKTARPKDPRHITVDTQGKFKEDMLGIRSVLEKKIFGKTFDDNIHVQLAYNILDVEKIMAQYVSDIVYMLHNTDKTERNDNLMGYMSIRNTYKTFCDTSNLPDDTKQKVENQKREFDKIIKSGRLGYFGEAFMVNSGNSTKLRPEKEIYHIFALMASLRQSYFHGYVKDTDYQGTTWAYTLEDKLKGPSHEFRETIDKIFDEGFSKISKDFGKMNKVNLQILEQMIGELYGSIERQNLTCDYYDFIQLKKHKYLGFSIKRLRETMLETTPAECYKAECYNSERQKLYKLIDFLIYDLYYNRKPARIEEIVDKLRESVNDEEKESIYSVEAKYVYESLSKVLDKSLKNSVSGETIKDLQKRYDDETANRIWDISQHSISGNVNCFCKLIYIMTLMLDGKEINDLLTTLVNKFDNIASFIDVMDELGLEHSFTDNYKMFADSKAICLDLQFINSFARMSKIDDEKSKRQLFRDALVILDIGNKDETWINNYLDSDIFKLDKEGNKLKGARHDFRNFIANNVIKSSRFKYLVKYSSADGMIKLKTNEKLIGFVLDKLPETQIDRYYESCGLDNAVVDKKVRIEKLSGLIRDMKFDDFSGVKTSNKAGDNDKQDKAKYQAIISLYLMVLYQIVKNMIYVNSRYVIAFHCLERDFGMYGKDFGKYYQGCRKLTDHFIEEKYMKEGKLGCNKKVGRYLKNNISCCTDGLINTYRNQVDHFAVVRKIGNYAAYIKSIGSWFELYHYVIQRIVFDEYRFALNNTESNYKNSIIKHHTYCKDMVKALNTPFGYDLPRYKNLSIGDLFDRNNYLNKTKESIDANSSIDSQ

SEQ ID NO: 24 - protein, 918 aa, Ruminococcus bicirculans
MAKKNKMKPRELREAQKKARQLKAAEINNNAVPAIAAMPAAEAAAPAAEKKKSSVKAAGMKSILVSENKMYITSFGKGNSAVLEYEVDNNDYNKTQLSSKDNSNIELCDVGKVNITFSSRRGFESGVEINTSNPTHRSGESSSVRGDMLGLKSELEKRFFGKNFDDNIHIQLIYNILDIEKILAVYVTNIVYALNNMLGEGDESNYDFMGYLSTFNTYKVFTNPNGSTLSDDKKENIRKSLSKFNALLKTKRLGYFGLEEPKTKDTRASEAYKKRVYHMLAIVGQIRQCVFHDKSGAKRFDLYSFINNIDPEYRETLDYLVDERFDSINKGFIQGNKVNISLLIDMMKGYEADDIIRLYYDFIVLKSQKNLGFSIKKLREKMLDEYGFRFKDKQYDSVRSKMYKLMDFLLFCNYYRNDIAAGESLVRKLRFSMTDDEKEGIYADEAAKLWGKFRNDFENIADHMNGDVIKELGKADMDFDEKILDSEKKNASDLLYFSKMIYMLTYFLDGKEINDLLTTLISKFDNIKEFLKIMKSSAVDVECELTAGYKLFNDSQRITNELFIVKNIASMRKPAASAKLTMFRDALTILGIDDKITDDRISEILKLKEKGKGIHGLRNFITNNVIESSRFVYLIKYANAQKIREVAKNEKVVMFVLGGIPDTQIERYYKSCVEFPDMNSSLGVKRSELARMIKNISFDDFKNVKQQAKGRENVAKERAKAVIGLYLTVMYLLVKNLVNVNARYVIAIHCLERDFGLYKEIIPELASKNLKNDYRILSQTLCELCDKSPNLFLKKNERLRKCVEVDINNADSSMTRKYRNCIAHLTVVRELKEYIGDICTVDSYFSIYHYVMQRCITKRENDTKQEEKIKYEDDLLKNHGYTKDFVKALNSPFGYNIPRFKNLSIEQLFDRNEYLTEK

SEQ ID NO: 25 - protein, 958 aa, Ruminococcus flavefaciens
MKKKIKARDLREAKKQEKLAAFSAKANTVYENEDKNVEAFPEALNLRSIKKSMNKAAGLKSTLIDGKSLYLTAFGKGNNAVVEHMIATDDSYSLKTLENEPSLKVKAADELKVTFMSRRPFVQESELSAVNPLHSGKDKPNKSAGQDMLGLKSELEKRYFGKIFDDNLHIQIIHNILDIEKIIAVYATNITAAIDHMVDDDNEQYLQGDFIGYMNTLNTYEVFMEPSKNPRLDSNARKNIENSREKFEYLLDTQRLGYLSLEYDKRSKDKRKSEEIKKRLYHLVAFAGQLRQWSFHSVEGLPRTWIYQLDNPKLAQEYRDTLDYFFNERFDAINKDFIETNNINLHILKEVFPAEDFQKLAALYYDFIVKKTFKNIGFSIKNLREQMLECDEAEKIRSKDMNSVRSKLYKLFDFCIFYQYFIDEERSRENVNYLRSTLNDEQKDAFYEEEGKRLWSENRKKFIYFCDNINKWVKNDYSDEVAKCIDLNEFRVNSNVSYFSKLLYAMSFFLDGKEINDLLTTLINKFDNIRSFIDTANFLNIDVKFTKDYDFFNIICDYAGELNIIKNIARMKKPSPSAKKNMYRDALTILGIPTEMSDEQLDAEIDKILEKKINPVTGKTEKGKNPFRNFIANNVIENKRFIYVIKFCNPKNVRKLVNNTKVTEFVLKRMPETQIDRYFESCIEGNLNPTTEKKIEKLAEMIKNIKFEEFRNVKQKVRDNSQEAVEKERFKAIIGLYLTVIYLLVKNLVNVNSRYVMAFHCLERDAKLYGVQNIGGDYLALTAKLCAEGDDYGKKLSEAKQNINQDKVQMPKNYFLARNKRWREAIEQDIDNAKKWFIGEKFNNVKNYRNNVAHLTAIRNCAEFIGEITKIDSYFALYHYLIQRQLAGRLDPNHPGFEKNYPQYAPLFKWNTYVKDMVKALNSPFGYNIPRFKDLSIDALFDRNEMKEETDDEKKIQT

SEQ ID NO: 26 - protein, 967 aa, Ruminococcus flavefaciens
MIEKKKSFAKGMGVKSTLVSGSKVYMTTFAEGSDARLEKIVEGDSIRSVNEGEAFSAEMADKNAGYKIGNAKFSHPKGYAVVANNPLYTGPVQQDMLGLKETLEKRYFGESADGNDNICIQVIHNILDIEKILAEYITNAAYAVNNISGLDKDIIGFGKFSTVYTYDEFKDPEHHRAAFNNNDKLINAIKAQYDEFDNFLDNPRLGYFGQAFFSKEGRNYIINYGNECYDILALLSGLRHWVVHNNEEESRISRTWLYNLDKNLDNEYISTLNYLYDRITNELTNSFSKNSAANVNYIAETLGINPAEFAEQYFRFSIMKEQKNLGFNITKLREVMLDRKDMSEIRKNHKVFDSIRTKVYTMMDFVIYRYYIEEDAKVAAANKSLPDNEKSLSEKDIFVINLRGSFNDDQKDALYYDEANRIWRKLENIMHNIKEFRGNKTREYKKKDAPRLPRILPAGRDVSAFSKLMYALTMFLDGKEINDLLTTLINKFDNIQSFLKVMPLIGVNAKFVEEYAFFKDSAKIADELRLIKSFARMGEPIADARRAMYIDAIRILGTNLSYDELKALADTFSLDENGNKLKKGKHGMRNFIINNVISNKRFHYLIRYGDPAHLHEIAKNEAVVKFVLGRIADIQKKQGQNGKNQIDRYYETCIGKDKGKSVSEKVDALTKIITGMNYDQFDKKRSVIEDTGRENAEREKFKKIISLYLTVIYHILKNIVNINARYVIGFHCVERDAQLYKEKGYDINLKKLEEKGFSSVTKLCAGIDETAPDKRKDVEKEMAERAKESIDSLESANPKLYANYIKYSDEKKAEEFTRQINREKAKTALNAYLRNTKWNVIIREDLLRIDNKTCTLFRNKAVHLEVARYVHAYINDIAEVNSYFQLYHYIMQRIIMNERYEKSSGKVSEYFDAVNDEKKYNDRLLKLLCVPFGYCIPRFKNLSIEALFDRNEAAKFDKEKKKVSGNS

SEQ ID NO: 27 - protein, 933 aa, Ruminococcus flavefaciens
MKKKMSLREKREAEKQAKKAAYSAASKNTDSKPAEKKAETPKPAEIISDNSRNKTAVKAAGLKSTIISGDKLYMTSFGKGNAAVIEQKIDINDYSFSAMKDTPSLEVDKAESKEISFSSHHPFVKNDKLTTYNPLYGGKDNPEKPVGRDMLGLKDKLEERYFGCTFNDNLHIQIIYNILDIEKILAVHSANITTALDHMVDEDDEKYLNSDYIGYMNTINTYDVFMDPSKNSSLSPKDRKNIDNSRAKFEKLLSTKRLGYFGFDYDANGKDKKKNEEIKKRLYHLTAFAGQLRQWSFHSAGNYPRTWLYKLDSLDKEYLDTLDHYFDKRFNDINDDFVTKNATNLYILKEVFPEANFKDIADLYYDFIVIKSHKNMGFSIKKLREKMLECDGADRIKEQDMDSVRSKLYKLIDFCIFKYYHEFPELSEKNVDILRAAVSDTKKDNLYSDEAARLWSIFKEKFLGFCDKIVVWVTGEHEKDITSVIDKDAYRNRSNVSYFSKLMYAMCFFLDGKEINDLLTTLINKFDNIANQIKTAKELGINTAFVKNYDFFNHSEKYVDELNIVKNIARMKKPSSNAKKAMYHDALTILGIPEDMDEKALDEELDLILEKKTDPVTGKPLKGKNPLRNFIANNVIENSRFIYLIKFCNPENVRKIVNNTKVTEFVLKRIPDAQIERYYKSCTDSEMNPPTEKKITELAGKLKDMNFGNFRNVRQSAKENMEKERFKAVIGLYLTVVYRVVKNLVDVNSRYIMAFHSLERDSQLYNVSVDNDYLALTDTLVKEGDNSRSRYLAGNKRLRDCVKQDIDNAKKWFVSDKYNSITKYRNNVAHLTAVRNCAEFIGDITKIDSYFALYHYLIQRQLAKGLDHERSGFDRNYPQYAPLFKWHTYVKDVVKALNAPFGYNIPRFKNLSIDALFDRNEIKKNDGEKKSDD

SEQ ID NO: 28 - protein, 922 aa, Ruminococcus sp.
MAKKNKMKPRELREAQKKARQLKAAEINNNAAPAIAAMPAAEVIAPVAEKKKSSVKAAGMKSILVSENKMYITSFGKGNSAVLEYEVDNNDYNKTQLSSKDNSNIELGDVNEVNITFSSKHGFGSGVEINTSNPTHRSGESSPVRGDMLGLKSELEKRFFGKTFDDNIHIQLIYNILDIEKILAVYVTNIVYALNNMLGIKDSESYDDFMGYLSARNTYEVFTHPDKSNLSDKVKGNIKKSLSKFNDLLKTKRLGYFGLEEPKTKDTRASEAYKKRVYHMLAIVGQIRQCVFHDKSGAKRFDLYSFINNIDPEYRDTLDYLVEERLKSINKDFIEGNKVNISLLIDMMKGYEADDIIRLYYDFIVLKSQKNLGFSIKKLREKMLEEYGFRFKDKQYDSVRSKMYKLMDFLLFCNYYRNDVAAGEALVRKLRFSMTDDEKEGIYADEAAKLWGKFRNDFENIADHMNGDVIKELGKADMDFDEKILDSEKKNASDLLYFSKMIYMLTYFLDGKEINDLLTTLISKFDNIKEFLKIMKSSAVDVECELTAGYKLFNDSQRITNELFIVKNIASMRKPAASAKLTMFRDALTILGIDDNITDDRISEILKLKEKGKGIHGLRNFITNNVIESSRFVYLIKYANAQKIREVAKDEKVVMFVLGGIPDTQIERYYKSCVEFPDMNSSLEAKRSELARMIKNISFDDFKNVKQQAKGRENVAKERAKAVIGLYLTVMYLLVKNLVNVNARYVIAIHCLERDFGLYKEIIPELASKNLKNDYRILSQTLCELCDDRNESSNLFLKKNKRLRKCVEVDINNADSSMTRKYRNCIAHLTVVRELKEYIGDIRTVDSYFSIYHYVMQRCITKRGDDTKQEEKIKYEDDLLKNHGYTKDFVKALNSPFGYNIPRFKNLSIEQLFDRNEYLTEK

SEQ ID NO: 29 - protein, 877 aa, Ruminococcus sp.
MKKQKSKKTVSKTSGLKEALSVQGTVIMTSFGKGNMANLSYKIPSSQKPQNLNSSAGLKNVEVSGKKIKFQGRHPKIATTDNPLFKPQPGMDLLCLKDKLEMHYFGKTFDDNIHIQLIYQILDIEKILAVHVNNIVFTLDNVLHPQKEELTEDFIGAGGWRINLDYQTLRGQTNKYDRFKNYIKRKELLYFGEAFYHENERRYEEDIFAILTLLSALRQFCFHSDLSSDESDHVNSFWLYQLEDQLSDEFKETLSILWEEVTERIDSEFLKTNTVNLHILCHVFPKESKETIVRAYYEFLIKKSFKNMGFSIKKLREIMLEQSDLKSFKEDKYNSVRAKLYKLFDFIITYYYDHHAFEKEALVSSLRSSLTEENKEEIYIKTARTLASALGADFKKAAADVNAKNIRDYQKKANDYRISFEDIKIGNTGIGYFSELIYMLTLLLDGKEINDLLTTLINKFDNIISFIDILKKLNLEFKFKPEYADFFNMTNCRYTLEELRVINSIARMQKPSADARKIMYRDALRILGMDNRPDEEIDRELERTMPVGADGKFIKGKQGFRNFIASNVIESSRFHYLVRYNNPHKTRTLVKNPNVVKFVLEGIPETQIKRYFDVCKGQEIPPTSDKSAQIDVLARIISSVDYKIFEDVPQSAKINKDDPSRNFSDALKKQRYQAIVSLYLTVMYLITKNLVYVNSRYVIAFHCLERDAFLHGVTLPKMNKKIVYSQLTTHLLTDKNYTTYGHLKNQKGHRKWYVLVKNNLQNSDITAVSSFRNIVAHISVVRNSNEYISGIGELHSYFELYHYLVQSMIAKNNWYDTSHQPKTAEYLNNLKKHHTYCKDFVKAYCIPFGYVVPRYKNLTINELFDRNNPNPEPKEEV

SEQ ID NO: 30 - protein, 922 aa, Ruminococcus sp.
MAKKNKMKPRELREAQKKARQLKAAEINNNAAPAIAAMPAAEVIAPVAEKKKSSVKAAGMKSILVSENKMYITSFGKGNSAVLEYEVDNNDYNKTQLSSKDNSNIELGDVNEVNITFSSKHGFGSGVEINTSNPTHRSGESSPVRGDMLGLKSELEKRFFGKTFDDNIHIQLIYNILDIEKILAVYVTNIVYALNNMLGIKDSESYDDFMGYLSARNTYEVFTHPDKSNLSDKVKGNIKKSLSKFNDLLKTKRLGYFGLEEPKTKDTRASEAYKKRVYHMLAIVGQIRQCVFHDKSGAKRFDLYSFINNIDPEYRDTLDYLVEERLKSINKDFIEGNKVNISLLIDMMKGYEADDIIRLYYDFIVLKSQKNLGFSIKKLREKMLEEYGFRFKDKQYDSVRSKMYKLMDFLLFCNYYRNDVAAGEALVRKLRFSMTDDEKEGIYADEAAKLWGKFRNDFENIADHMNGDVIKELGKADMDFDEKILDSEKKNASDLLYFSKMIYMLTYFLDGKEINDLLTTLISKFDNIKEFLKIMKSSAVDVECELTAGYKLFNDSQRITNELFIVKNIASMRKPAASAKLTMFRDALTILGIDDNITDDRISEILKLKEKGKGIHGLRNFITNNVIESSRFVYLIKYANAQKIREVAKNEKVVMFVLGGIPDTQIERYYKSCVEFPDMNSSLEAKRSELARMIKNISFDDFKNVKQQAKGRENVAKERAKAVIGLYLTVMYLLVKNLVNVNARYVIAIHCLERDFGLYKEIIPELASKNLKNDYRILSQTLCELCDDRNESSNLFLKKNKRLRKCVEVDINNADSSMTRKYRNCIAHLTVVRELKEYIGDIRTVDSYFSIYHYVMQRCITKRGDDTKQEEKIKYEDDLLKNHGYTKDFVKALNSPFGYNIPRFKNLSIEQLFDRNEYLTEK

SEQ ID NO: 31 - protein, 919 aa, Ruminococcus sp.
MAKKNKMKPRELREAQKKARQLKAAEINNNAAPAIAAMPAAEVIAPAAEKKKSSVKAAGMKSILVSENKMYITSFGKGNSAVLEYEVDNNDYNQTQLSSKDNSNIQLGGVNEVNITFSSKHGFESGVEINTSNPTHRSGESSPVRGDMLGLKSELEKRFFGKTFDDNIHIQLIYNILDIEKILAVYVTNIVYALNNMLGVKGSESHDDFIGYLSTNNIYDVFIDPDNSSLSDDKKANVRKSLSKFNALLKTKRLGYFGLEEPKTKDNRVSQAYKKRVYHMLAIVGQIRQCVFHDKSGAKRFDLYSFINNIDPEYRDTLDYLVEERLKSINKDFIEDNKVNISLLIDMMKGYEADDIIRLYYDFIVLKSQKNLGFSIKKLREKMLDEYGFRFKDKQYDSVRSKMYKLMDFLLFCNYYRNDIAAGESLVRKLRFSMTDDEKEGIYADEAAKLWGKFRNDFENIADHMNGDVIKELGKADMDFDEKILDSEKKNASDLLYFSKMIYMLTYFLDGKEINDLLTTLISKFDNIKEFLKIMKSSAVDVECELTAGYKLFNDSQRITNELFIVKNIASMRKPAASAKLTMFRDALTILGIDDKITDDRISGILKLKEKGKGIHGLRNFITNNVIESSRFVYLIKYANAQKIREVAKNEKVVMFVLGGIPDTQIERYYKSCVEFPDMNSSLGVKRSELARMIKNISFDDFKNVKQQAKGRENVAKERAKAVIGLYLTVMYLLVKNLVNVNARYVIAIHCLERDFGLYKEIIPELASKNLKNDYRILSQTLCELCDKSPNLFLKKNERLRKCVEVDINNADSSMTRKYRNCIAHLTVVRELKEYIGDICTVDSYFSIYHYVMQRCITKRENDTKQEEKIKYEDDLLKNHGYTKDFVKALNSPFGYNIPRFKNLSIEQLFDRNEYLTEK

SEQ ID NO: 32 - DNA, 36 bp, Unknown
  Direct repeat nucleotide sequence
gaactacacccgtgcaaaaatgcaggggtctaaaac

SEQ ID NO: 33 - DNA, 36 bp, Unknown
  Direct repeat nucleotide sequence
gaattacacccgtgcaaaaatgcaggggtctaaaac

SEQ ID NO: 34 - DNA, 36 bp, Unknown
  Direct repeat nucleotide sequence
gaactacacccgtgcaaaattgcaggggtctaaaac

SEQ ID NO: 35 - DNA, 36 bp, Unknown
  Direct repeat nucleotide sequence
gaactacacccctgcagaaatgctggggtctgaaac

SEQ ID NO: 36 - DNA, 36 bp, Unknown
  Direct repeat nucleotide sequence
ggacaataacctgcgaattttggcaggttctatgac

SEQ ID NO: 37 - DNA, 36 bp, Unknown
  Direct repeat nucleotide sequence
gtgcagtagccttacagattcgtagggttctgagac

SEQ ID NO: 38 - DNA, 36 bp, Unknown
  Direct repeat nucleotide sequence
ctactacactggtgcgaatttgcactagtctaaaac

SEQ ID NO: 39 - DNA, 36 bp, Unknown
  Direct repeat nucleotide sequence
ctactacactagtgcaaatttgcactagtctaaaac

SEQ ID NO: 40 - DNA, 36 bp, Unknown
  Direct repeat nucleotide sequence
ctactacacaggtgcaattttgcactagtctaaaac

SEQ ID NO: 41 - DNA, 36 bp, Unknown; identical to SEQ ID NO: 38
  Direct repeat nucleotide sequence

SEQ ID NO: 42 - DNA, 36 bp, Unknown
  Direct repeat nucleotide sequence
ctactatactggtgcgaatttgcactagtctaaaac

SEQ ID NO: 43 - DNA, 36 bp, Unknown; identical to SEQ ID NO: 32
  Direct repeat nucleotide sequence

SEQ ID NO: 44 - DNA, 36 bp, Unknown
  Direct repeat nucleotide sequence
catgtaaacccctaacaaatgatagggggttgaaac

SEQ ID NO: 45 - DNA, 36 bp, Unknown
  Direct repeat nucleotide sequence
ctactactaccctgttatttgacagggttcaaaaac

SEQ ID NO: 46 - DNA, 36 bp, Unknown
  Direct repeat nucleotide sequence
gaactacagccctgtgaaataacggggttctaaaac

SEQ ID NO: 47 - DNA, 36 bp, Unknown
  Direct repeat nucleotide sequence
gaactacagccctgtgaaataacagggttctaaaac

SEQ ID NO: 48 - DNA, 36 bp, Unknown
  Direct repeat nucleotide sequence
gaacgacgtcactacacaccgagaggtgtctaaaac

SEQ ID NO: 49 - DNA, 36 bp, Unknown
  Direct repeat nucleotide sequence
caactactaccctgccaaatggcagggttcagaaac

SEQ ID NO: 50-51 - skipped (2 entries)

SEQ ID NO: 52 - DNA, 35 bp, Unknown
  Direct repeat nucleotide sequence
gaactacactctggctgaaagtcagggtctaaaac

SEQ ID NO: 53 - DNA, 35 bp, Unknown
  Direct repeat nucleotide sequence
gaactacaccctggctgaaagtcagggtctaaaac

SEQ ID NO: 54 - DNA, 36 bp, Unknown
  Direct repeat nucleotide sequence
ctactacactggtgcaaatttgcactagtctaaaac

SEQ ID NO: 55 - DNA, 36 bp, Unknown
  Direct repeat nucleotide sequence
ctactacactagtgcgaatttgcactagtctaaaac

SEQ ID NO: 56 - DNA, 38 bp, Unknown
  Direct repeat nucleotide sequence
cagcactacacccccctgaaacaggaggggtctaaaac

SEQ ID NO: 57 - DNA, 36 bp, Unknown
  Direct repeat nucleotide sequence
ctactacactagtgcgaatttgcactagtctaaaat

SEQ ID NO: 58 - DNA, 36 bp, Unknown
  Direct repeat nucleotide sequence
ctactacactagtgcgaatttgcgctagtctaaaac

SEQ ID NO: 59 - DNA, 36 bp, Unknown
  Direct repeat nucleotide sequence
ctactatactggtgcgaatttgcactagtctaaaat

SEQ ID NO: 60 - DNA, 37 bp, Unknown
  Direct repeat nucleotide sequence
ccctttgtactatacctgttttacacaggtctaaaac

SEQ ID NO: 61 - DNA, 37 bp, Unknown
  Direct repeat nucleotide sequence
gtactatacctgttttacacaggataataaccaaaat

SEQ ID NO: 62 - DNA, 36 bp, Unknown; identical to SEQ ID NO: 38
  Direct repeat nucleotide sequence

SEQ ID NO: 63 - DNA, 36 bp, Unknown; identical to SEQ ID NO: 55
  Direct repeat nucleotide sequence

SEQ ID NO: 64 - DNA, 36 bp, Unknown
  Direct repeat nucleotide sequence
gaactatacccctaccaaatggtcggggtctgaaac

SEQ ID NO: 65 - DNA, 36 bp, Unknown
  Direct repeat nucleotide sequence
caagtaaacccctaccaactggtcggggtttgaaac

SEQ ID NO: 66 - DNA, 36 bp, Unknown
  Direct repeat nucleotide sequence
caagtaaacccttaccaactggtcggggtttgaaac

SEQ ID NO: 67 - DNA, 36 bp, Unknown
  Direct repeat nucleotide sequence
gaactatagtagtgtaaatttgcactactataaaac

SEQ ID NO: 68 - DNA, 36 bp, Unknown; identical to SEQ ID NO: 55
  Direct repeat nucleotide sequence

SEQ ID NO: 69 - DNA, 36 bp, Unknown; identical to SEQ ID NO: 58
  Direct repeat nucleotide sequence

SEQ ID NO: 70 - DNA, 36 bp, Unknown; identical to SEQ ID NO: 55
  Direct repeat nucleotide sequence

SEQ ID NO: 71 - DNA, 36 bp, Unknown; identical to SEQ ID NO: 54
  Direct repeat nucleotide sequence

SEQ ID NO: 72 - DNA, 36 bp, Unknown; identical to SEQ ID NO: 54
  Direct repeat nucleotide sequence

SEQ ID NO: 73 - DNA, 36 bp, Unknown
  Direct repeat nucleotide sequence
caactacaaccccgtaaaaatacggggttctgaaac

SEQ ID NO: 74 - DNA, 36 bp, Unknown; identical to SEQ ID NO: 55
  Direct repeat nucleotide sequence

SEQ ID NO: 75 - DNA, 36 bp, Unknown; identical to SEQ ID NO: 54
  Direct repeat nucleotide sequence

SEQ ID NO: 76 - DNA, 36 bp, Unknown
  Direct repeat nucleotide sequence
ctactacactggtgcaaattagcactagtctaaaac

SEQ ID NO: 77 - DNA, 36 bp, Unknown; identical to SEQ ID NO: 76
  Direct repeat nucleotide sequence

SEQ ID NO: 78 - protein, 392 aa, Ruminococcus sp.
MLIPPSTFLPKRDKNVPYIAEVQSIPLSPSAYSVIIKDKSIFETSLSPNGSVSMSSFLTSIFDSAYIASLKYKSDDNYKYIGIPLLNAFVEWQIEEIDDSLDDKSKEIIKSYLISKLSAKYEKTKTENAVRVRLSICRDLYDTLSSDDLYYENKVYSLTLRRFLKAVYEDYALLSDCERERLIFADNIIKINEVIKQNGSRYYSFIYAYSNMYSREKRRIRLIPYRIVSDEYKMYNYLVCLSDEKSAGKEFKADSYRISRLSGLSIAEKLSQKEYSSVTEYERLKEGHVKSVKHLLSDPRFGSDESDISKVYLTEKGVEMFGKILYQRPILKGNEKPKPNTVNEFISPPIQVKYYFNKFGKDGVILSPSDSFEEMRTLYVEGAEAYNREVEM

SEQ ID NO: 79 - protein, 389 aa, Ruminococcus sp.
MLILPSTFLPKRDKNVPYIAEVQSIPLSPSAYSVIIKDKSIFETSLSPNGSVSMSSFLTSIFDSAYIASLKYKSEKYNGIPLLNAFVKWQIEEINDGLDDKSKEIIKSYLISKLSAKYEKTKTENAVRVRLSICRDLYDTLSSDDLYYENKVYSSTLRRFLKAVYEDYALLSDCERERLIFADNIIKINEVIKQNGSRYYSFIYAYSNMYSREKRRIRLIPYRIVSDEYKMYNYLVCLSDEKSAGKEFKADSYRISRLSGLSIAEKLSQKEYSSVTEYERLKEGHVKSVKHLLSDPRFGSDESDISKVYLTEKGVEMFGKILYQRPILKGNEKPKPNAVNEFISPPIQVKYYFNKFGKDGVILSPSDSFEEMRTLYVEGAEAYNREVEM

SEQ ID NO: 80 - protein, 392 aa, Ruminococcus bicirculans
MSMTPSTFLPKREDGVPYIAEVQSIPLSPSAYSVIIKDKSIFETSLSPNGSVSMSSFLTSIFDSAYIASLKYKSDDNYKYIGIPLLNAFVKWQIEEIDDSLDDKSKEIIKSYLISKLSAKYEKTKTENAVRVRLSICRDLYDTLSSDDLYYENKVYSSTLRRFLKAVYEDYALLSDCERERLIFADNIIKINEVIKQNGSRYYSFIYAYSNMYSREKRRIRLIPYRIVSDEYKMYNYLVCLSDEKSAGKEFKADSYRISRLSGLSIAEKLSQKEYSSVTEYERLKEGHVKSVKHLLSDPRFGSDESDISKVYLTEKGVEMFGKILYQRPILKGNEKPKPNAVNEFISPPIQVKYYFNKFGKDGVILSPSDSFEEMRTLYVEGAEAYNREVEM

SEQ ID NO: 81 - protein, 392 aa, Ruminococcus sp.
MLIPPSTFLPKRDKNVPYIAEVQSIPLSPSAYSVIIKDKSIFETSLSPNGSVSMSSFLTSIFDSAYIASLKYKSDDNYKYIGIPLLNAFVKWQIEEIDDGLDDKSKEIIKSYLISKLSAKYEKTKTENAVRVRLSICRDLYDTLSSDDLYYENKVYSSTLRRFLKAVYEDYALLSDCERERLIFADNIIKINEVIKQNGSRYYSFIYAYSNMYSREKRRIRLIPYRIVSDEYKMYNYLVCLSDEKSAGKEFKADSCRISRLSGLSIAEKLSQKEYSSVTEYERLKEVHVKSVKHLLSDPRFGSDESDISKVYLTEKGVEMFGKILYQRPILKGNEKPKPNAVNEFISPPIQVKYYFNKFGKDGVILSPSDSFEEMRTLYVEGAEAYNREVEM

SEQ ID NO: 82 - protein, 389 aa, Unknown
  gut metagenome sequence
MSMTPSTFLPKRDKNATYIAEVQSIPLSPSAYSVIIKDKSIFETSLSPNGSVSMSSFLTSIFDSAYIASLKYKSEKYNGIPLLNAFVKWQIEEIDDGLDDKSKEIIKSYLISKLSAKYEKTKTENAVRVRLSICRDLYDTLSSDDLYYENKVYSSTLRRFLKAVYEDYALLSDCERERLIFADNIIKINEIIKQNGSRYYSFIYAYSNMYSREKRRIRLIPYRIVSDEYKMYNYLVCLSDEKSAGKEFKADSYRISRLSGLSIAEKLSQKEYSSVTEYERLKEGHVKSVKHLLSDPRFGSDESDISKVYLTEKGVEMFGKILYQRPILKGNEKPKPNTVNEFISPPIQVKYYFNKFGKDGVILSPSDSFEEMRTLYVEGAEAYNREVEM

SEQ ID NO: 83 - protein, 392 aa, Unknown
  gut metagenome sequence
MFIPPSTFLPKREGGVPYIAEVQSIPLSPSAYSVIIKDKSIFETSLSPNGSVSMSSFLTSIFDSAYIASLKYKTDDNYKYIGIPLLNAFIKWQIEEIDDGLDDKSKEIIKSYLISKFSAKYEKTKTENAVRVRLSICRDLYDTLSSDDLYYENKVYSSTLRRFLKAVYEDYALLSDCERERLIFADNIIKINEVIKQNGNRYYSFIYAYSNMYSREKRRIRLIPYRIISDEYKMYNYLVCLSDEKSAGKEFKADSCRISRLSGLSIAEKLSQKEYSSVTEYERLKEGHVKSVKHLLSDPRFGSDESDISKVYLTEKGVEMFGKILYQRPILKGNEKPKPNAVNEFISPPIQVKYYFNKFGKDGVILSPSDSFEEMRTLYVEGAEAYNREVEM

SEQ ID NO: 84 - protein, 390 aa, Unknown
  human gut metagenome sequence
MSMTPSTFLPKRDTNIPYIAEVQSIPLSPSAYAVIVKDKSIFETSLFPNGGSVSMSSFLTRIFDSAYIASLKYKSEEYNGIPLLNAFVQWQIEEIDDSLDDKSKEIIKSYLISKLSAKYEKTKTENAVRVRLSICRDLYDTLSSDDLYYENKVYSSTLRRFLKAVYEDYALLSDCERERLIFADNIIKINEVIKQNGSRYYSFIYAYSNMYSREKRRIRLIPYRIVSDEYKMYNYLVCLSDEKSAGKEFKADSYRISRLSGLSIAEKLSQKEYSSVTEYERLKEGHVKSVKHLLSDPRFGSDESDISKVYLTEKGVEMFGKILYQRPILKGNEKPKPNAVNEFISPPIQVKYYFNKFGKDGVILSPSDSFEEMRTLYVEGAEAYNREVEM

SEQ ID NO: 85 - protein, 392 aa, Unknown
  human metagenome sequence
MLIPPSTFLPKREGGVPYIAEVQSIPLSPSAYSVIIKDKSIFETSLFPNGSVSMSSFLTSIFDSAYIASLKYKSDDNYKYIGIPLLNAFVKWQIEEIDDGLDDKSKEIIKSYLISKLSAKYKKTKTENAVRVRLSICRDLYDTLSSDDLYYENKVYSSTLRRFLKAVYEDYALLSDCERERLIFADNIIKINEVIKQNGSRYYSFIYAYSNMYSREKRRIRLIPYRIVSDEYKMYNYLVCLSDEKSAGKEFKADSYRISRLSGLSIAEKLSQKEYSSVTEYERLKEVHVKSVKHLLSDPRFGSDESDISKVYLTEKGVEMFGKILYQRPILKGNEKPKPNAVNEFISPPIQVKYYFNKFGKDGVILSPSDSFEEMRTLYVEGAEAYNREVEM

SEQ ID NO: 86 - protein, 389 aa, Unknown
  human-digestive system-homo sapiens sequence
MLIPPSTFLPKRKDGVPYIAEVQSIPLSPSAYAVIVKDKSIFETSLSPNSSVSMSSFLTRIFDSAYRASLKYKSEEYNGIPLLNAFVQWQIEEIDGSLDDKSKEIIRSYLISKLSAKYKKTKTENAVRVRLSICRDLYDTLSRVDLCYENKVYGSTLRRFLKAVYEDYALLSDCERERLIFADNIIKINEVIKQNSNRYDNFIYAYSSMYSREKCRIRLIPYRIVSDEYKMYNYLVCLSDEKSVGKEFKADSYRISRLSGLSIAEKLSQKEYSSVTEYERLKEGHVKSVKHLLSDPRFGSDESDISKVYLTEKGVEMFGKILYQRPILKGNEKPKPNAVNEFISPPIQVKYYFNKFGKDGVILSPSDSFEEMRTLYVEGAEAYNREVEM

SEQ ID NO: 87 - protein, 359 aa, Unknown
  gut metagenome sequence
MGTENSSNEYQEARQHLSLSDAAWAVLQDDRQDFGGGRSWAGILNYVFAEYRDKADASISVAVERRRAQYEEKLVGVAAPAVRKAVLEALLADYTEELIKKAAQNGATPPDKESFKFRLDRDNYAFREQWLDSPDAQYYGGRFSRYLRAVLEEYAAKTVYQREAIYFDPQMRLIQASAANGELLRIRLKKGSEFEVRPYGVLGDRQETYHYLVGLSRPDGTREPEKASSFRLSNIVKLEVSFRRSGRLTEKERTDIESSIRGKGVQFLVQQRETIRIRLTEDGRQNYGRQLHLRPAARERAEVDDGLYRWEYTFYCTEFQAKAYFLKFCGDAKVVEPQSLRETFAQEYRSGLRACGEEP

SEQ ID NO: 88 - protein, 360 aa, Unknown
  gut metagenome sequence
MGTENSSNEYQEARQHLSLSDAAWAVLQDDRRDFGGGRSWAGILNYVFTMYRDKADASVSVAVSRRREQLEEQLGGVVSPAARDAVLDRLMEVYAGELAEKAMSDGAVAQQKEVFKFRLDRDNYAFREQWLDSPDAARYYGNRFSRYLRAVLEEYAAKTVYQREAIYFDPQMRLIRAAAANGELLRIRMKTGSSFEVRPYGVLGDRQETYHYLVGLSRPDGTRGPEKEFNFRLSKIIKLDVSFRRSGRLTEKERTDIESSIRGKGVQFLAQQRETIRIRLTEEGRRDYGSQMHLRPPAQTRTAVDDGAYRWEYTFFCTEFQARAYFLKFCGEAKVVEPQSLRDTLAQEYRSGLRACGEEP

SEQ ID NO: 89 - protein, 412 aa, Ruminococcus flavefaciens
MENKGKQREFIKDYNKIVPFLEKVFYYGTFSSEDYEKMDMMKKSKYSDYKRILEFAFRDVLYEKKNINGKKALGLRIDHFYDPHRAFLRFFTLKSFVSIERLFLTCYILKRISKKGKCTINDICIGLDEVSVDDEVKDRKSTISRIIKNMVDYGFLIKKGSAYSINTGAKTLNNVALLNLIDICTNAYPISICGSCIQNKIDQNYQSPFLIKHLHLGQIFNDELIWKLLIYANEKKQLCIELKKGIKLRELLPYRIITNRETGRQYLFAIYVGTNNFDEYLMLRLDKISDIKIEASECEIPDDTVLKEKYDTAFRYSFNGTTFLKRDQQPESGILVYDKSFEWNIKKHFPYSDAVSVDEKHNKVSIKVNTLTELKPWLRRNYDKVSLVESSDDTVDKMCDELKKWRKMYGII

SEQ ID NO: 90 - protein, 412 aa, Ruminococcus flavefaciens
MANEEKNRSFFKITTYENFRRFLKTNFYYCSLSQGQQGMFIKSIGTTKYNEYKNIIELIAGGKIEFPKINKRLAFRYNISQLESDYNELANSFQLRTLTSLDACLTLYILLFLSDKEMGSSDIYNRIGDIDFDIDEKTIRGKLKNMCEYGMISYKNKKYSLNECSLYSVDTSIMLSLLNMADFMKNLVYPEVLGYDLFAALKKIYEERTGNEYISPFQFKYSHLANILDDNVLWTLIEAIDNRQHVAFEYGGKIKERLIPVKIFTENEYNRCYLFAVKRFRNKLKFFVFRLSKIYNLKITNSDEDITEADFKEYSELYDSEKKCSFFGKIDSSAQNDTVELKYKRGIRSQLERDFSCIEFRKNYTAIVTVKSKKMMIPYLRANMGLIRTTDDELSGILNEDIEEMKKNYGII

SEQ ID NO: 91 - protein, 420 aa, Unknown
  mammals-digestive system-feces sequence
MNVIIKQGDIFMGNEERNRSFFKEDTYETFRKFLKTNFYYCTLSQKQQSEYVKYIGTTQYNHYRGIIERISEGKISFKKYNKKKAFKYDVSQFASDYNVLANSFQLKTITASQTCLTIYILCVLAKSSLTRKGIVAAIADGIDEKTIVSRIKSMKEAGLISYDGEKYFIEESIFYSMDESLLLRLLNMVDFMKNLVYPEALGYNLFDIIKKIYDDRLCVDYYSPFQLKYSHLANILDDNVLWSLIEAIEERQYISFIYKNEKKERIIPVKLFTENEYARRYLFAVKKFGNNYKKFIFRLSEIYNIKVMEKEVSVSKEEFGKLLEMYETESGYSFSGKIAPSSKTVSIKLRYKGRLKNQIERDFSNVKFEKGNTAEILIKNKKMIIPYLRSNMQLIQSTDEELSQKINSEIMEMKKLYGII

SEQ ID NO: 92 - protein, 314 aa, Ruminococcus flavefaciens
MELFNEYRNKSLRAFLKLAERISYGEELSIDEFEAEYYRLSGDNKKITSVFYKNTLYNDKLPIFDTREGKVRLFGEPDKCSNKHISDTLLKSEITWLHNALNDKLSKLFLSDEERISIDAKLSDYTEYYKNIDDMWRSNEDISEEVEKNFKIILKAINEKQALSYTFKNKNCEGFPVRIEYDERTCRIYMIIYDGNRFVKSDISKLSDIYITENSIDTIPEIKDDMLNKKAYLPVVFTVTDDKNRKAIDRALLAFSVYDHVVEPIDEKTARFTIQYYTMDLDLLIKDILAFGSDIKVESPRYVVKRITDILRKV

SEQ ID NO: 93 - protein, 318 aa, Unknown
  mammals-digestive system-feces sequence
MELFNEFRNKSFNAFITLAERIANDNAVFSKTEFETEYYRLSGDENRITSIFYNNVINNEKYQIFTIPKDSKDKVQLSIEFDNKDDINIANIPITSEKKWLHSALHDKLSKLFLSDEEISYIDETISEFPLYYEHIDDSWRKGENISEESVINFRIILQAINEKKSLSYKYNGKDSEGSPVKIEYDERTCKIYMILYNGSRFIKSDISGLSDICIKEQLYEKIPDIKEGMLEKKARHPIVFTVTDNKNRKSIERALLAFSVYEHYVEPIDKNTAKFTIHYYTMDLDILIKDILAFGADIKVEAPQFVVKKIINILENV

SEQ ID NO: 94 - protein, 6 aa, Artificial Sequence
  Synthetic peptide
  MOD_RES (2)..(5): Any amino acid
RXXXXH

SEQ ID NO: 95 - protein, 16 aa, Artificial Sequence
  Synthetic peptide
  MOD_RES (2)..(5): Any amino acid
  MOD_RES (7)..(10): Any amino acid
  VARIANT (11)..(11): /replace=Ile
  MOD_RES (14)..(15): Any amino acid
  SITE (1)..(16): /note=Variant residues given in the sequence have no preference with respect to those in the annotations for variant positions
DXXXXQXXXXLLDXXK

SEQ ID NO: 96 - protein, 18 aa, Artificial Sequence
  Synthetic peptide
  MOD_RES (2)..(10): Any amino acid
  MOD_RES (12)..(16): Any amino acid
  VARIANT (17)..(17): /replace=Ile
  SITE (1)..(18): /note=Variant residues given in the sequence have no preference with respect to those in the annotations for variant positions
FXXXXXXXXXGXXXXXLR

SEQ ID NO: 97 - protein, 17 aa, Artificial Sequence
  Synthetic peptide
  MOD_RES (3)..(3): Any amino acid
  MOD_RES (5)..(15): Any amino acid
KEXNXXXXXXXXXXXNI

SEQ ID NO: 98 - protein, 15 aa, Artificial Sequence
  Synthetic peptide
  MOD_RES (2)..(4): Any amino acid
  MOD_RES (6)..(6): Any amino acid
  MOD_RES (10)..(13): Any amino acid
YXXXRXKBLXXXXLF

SEQ ID NO: 99 - RNA, 102 nt, Artificial Sequence
  Synthetic cr_F1 sequence
gaacuacacccgugcaaaauugcaggggucuaaaacucauccgcuuauuaucacuuauucaggcgugaacuacacccgugcaaaauugcaggggucuaaaac

SEQ ID NO: 100 - RNA, 102 nt, Artificial Sequence
  Synthetic cr_F4 sequence
gaacuacacccgugcaaaauugcaggggucuaaaacauagguacauugagcaacugacugaaaugcgaacuacacccgugcaaaauugcaggggucuaaaac

SEQ ID NO: 101 - RNA, 103 nt, Artificial Sequence
  Synthetic cr_F7 sequence
cuacuacacuggugcaaauuugcacuagucuaaaaccaagggugaacacuaucccauaucaccagcucuacuacacuggugcgaauuugcacuagucuaaaac

SEQ ID NO: 102 - RNA, 103 nt, Artificial Sequence
  Synthetic cr_F10 sequence
cuacuacacuggugcaaauuugcacuagucuaaaacccuguggaacaccuacaucuguauuaacgaacuacuacacuggugcgaauuugcacuagucuaaaac

SEQ ID NO: 103 - RNA, 100 nt, Artificial Sequence
  Synthetic cr_3 sequence
gauuuagacuaccccaaaaacgaaggggacuaaaacauuuuuuucuccauuuuagcuuccuuaggauuuagacuaccccaaaaacgaaggggacuaaaac

SEQ ID NO: 104 - RNA, 100 nt, Artificial Sequence
  Synthetic cr_4 sequence
gauuuagacuaccccaaaaacgaaggggacuaaaacagaaucauaauggggaaggccauccagcgauuuagacuaccccaaaaacgaaggggacuaaaac

SEQ ID NO: 105 - RNA, 130 nt, Artificial Sequence
  Synthetic sub_F1 sequence
auacgcugugguucgccaagucccaauggcaucguaaagaacauuuugaggcauuucagucaguugcucaauguaccuauaaccagaccguucagcuggauauuacggccaagagagcacgaaaguguug

SEQ ID NO: 106 - RNA, 130 nt, Artificial Sequence
  Synthetic sub_F4 sequence
auacgcugugguucgccaagaguuauuggugcccuuaaacgccuggugcuacgccugaauaagugauaauaagcggaugaauggcagaaauucgaaagcaaauucgacccaagagagcacgaaaguguug

SEQ ID NO: 107 - RNA, 131 nt, Artificial Sequence
  Synthetic sub_F7 sequence
auacgcugugguucgccaagcggaauuccguauggcaaugaaagacggugagcuggugauaugggauaguguucacccuuguuacaccguuuuccaugagcaaacugaaacaagagagcacgaaaguguug

SEQ ID NO: 108 - RNA, 131 nt, Artificial Sequence
  Synthetic sub_F10 sequence
auacgcugugguucgccaagcucccagagccugauaaaaacgguuagcgcuucguuaauacagauguagguguuccacaggguagccagcagcauccugcgaugcagauccaagagagcacgaaaguguug

SEQ ID NO: 109 - RNA, 880 nt, Artificial Sequence
  Synthetic GFP sequence
gggaauugugagcggauaacaauuccccucuagaaauaauuuuguuuaacuuuaagaaggagauuuaaauaugaaaaucgaagaagguaaaggucaccaucaccaucaccacggauccaugacggcauugacggaaggugcaaaacuguuugagaaagagaucccguauaucaccgaacuggaaggcgacgucgaagguaugaaauuuaucauuaaaggcgaggguaccggugacgcgaccacggguaccauuaaagcgaaauacaucugcacuacgggcgaccugccggucccgugggcaacccuggugagcacccugagcuacgguguucaguguuucgccaaguacccgagccacaucaaggauuucuuuaagagcgccaugccggaagguuauacccaagagcguaccaucagcuucgaaggcgacggcguguacaagacgcgugcuaugguuaccuacgaacgcgguucuaucuacaaucgugucacgcugacuggugagaacuuuaagaaagacggucacauucugcguaagaacguugcauuccaaugcccgccaagcauucuguauauucugccugacaccguuaacaauggcauccgcguugaguucaaccaggcguacgauauugaaggugugaccgaaaaacugguuaccaaaugcagccaaaugaaucguccguuggcgggcuccgcggcagugcauaucccgcguuaucaucacauuaccuaccacaccaaacugagcaaagaccgcgacgagcgccgugaucacaugugucugguagaggucgugaaagcgguugaucuggacacguaucaguaauaaaaagcccgaaaggaagcugaguuggcugcugccaccgcugagcaauaa

SEQ ID NO: 110 - DNA, 27 bp, Artificial Sequence
  Synthetic T7_primer sequence
cctcgagtaatacgactcactataggg

SEQ ID NO: 111 - DNA, 145 bp, Artificial Sequence
  Synthetic cr_F1_IVT_rev sequence
gttttagacccctgcaattttgcacgggtgtagttcgcatttcagtcagttgctcaatgtacctatgttttagacccctgcaattttgcacgggtgtagttcccctatagtgagtcgtattactcgaggaattcttattatttct

SEQ ID NO: 112 - DNA, 145 bp, Artificial Sequence
  Synthetic cr_F4_IVT_rev sequence
gttttagacccctgcaattttgcacgggtgtagttcacgcctgaataagtgataataagcggatgagttttagacccctgcaattttgcacgggtgtagttcccctatagtgagtcgtattactcgaggaattcttattatttct

SEQ ID NO: 113 - DNA, 146 bp, Artificial Sequence
  Synthetic cr_F7_IVT_rev sequence
gttttagactagtgcaaattcgcaccagtgtagtagagctggtgatatgggatagtgttcacccttggttttagactagtgcaaatttgcaccagtgtagtagccctatagtgagtcgtattactcgagggatccttattacattt

SEQ ID NO: 114 - DNA, 146 bp, Artificial Sequence
  Synthetic cr_F10_IVT_rev sequence
gttttagactagtgcaaattcgcaccagtgtagtagttcgttaatacagatgtaggtgttccacagggttttagactagtgcaaatttgcaccagtgtagtagccctatagtgagtcgtattactcgagggatccttattacattt

SEQ ID NO: 115 - DNA, 143 bp, Artificial Sequence
  Synthetic cr_3_IVT_rev sequence
gttttagtccccttcgtttttggggtagtctaaatcctaaggaagctaaaatggagaaaaaaatgttttagtccccttcgtttttggggtagtctaaatcccctatagtgagtcgtattactcgagggatccttattacattt

SEQ ID NO: 116 - DNA, 143 bp, Artificial Sequence
  Synthetic cr_4_IVT_rev sequence
gttttagtccccttcgtttttggggtagtctaaatcgctggatggccttccccattatgattctgttttagtccccttcgtttttggggtagtctaaatcccctatagtgagtcgtattactcgagggatccttattacattt

SEQ ID NO: 117 - DNA, 130 bp, Artificial Sequence
  Synthetic sub_F1_rev sequence
atacgctgtggttcgccaagtcccaatggcatcgtaaagaacattttgaggcatttcagtcagttgctcaatgtacctataaccagaccgttcagctggatattacggccaagagagcacgaaagtgttg

SEQ ID NO: 118 - DNA, 130 bp, Artificial Sequence
  Synthetic sub_F4_rev sequence
atacgctgtggttcgccaagagttattggtgcccttaaacgcctggtgctacgcctgaataagtgataataagcggatgaatggcagaaattcgaaagcaaattcgacccaagagagcacgaaagtgttg

SEQ ID NO: 119 - DNA, 131 bp, Artificial Sequence
  Synthetic sub_F7_rev sequence
atacgctgtggttcgccaagcggaattccgtatggcaatgaaagacggtgagctggtgatatgggatagtgttcacccttgttacaccgttttccatgagcaaactgaaacaagagagcacgaaagtgttg

SEQ ID NO: 120 - DNA, 131 bp, Artificial Sequence
  Synthetic sub_F10_rev sequence
atacgctgtggttcgccaagctcccagagcctgataaaaacggttagcgcttcgttaatacagatgtaggtgttccacagggtagccagcagcatcctgcgatgcagatccaagagagcacgaaagtgttg

SEQ ID NO: 121 - DNA, 46 bp, Artificial Sequence
  Synthetic PT7_Sub_fw sequence
cgaaattaatacgactcactatagggatacgctgtggttcgccaag

SEQ ID NO: 122 - DNA, 48 bp, Artificial Sequence
  Synthetic Sub_ rv sequence
cgaaattatttcgactgagattattccccaacactttcgtgctctctt

SEQ ID NO: 123 - DNA, 30 bp, Artificial Sequence
  Synthetic GFP_PCR_fwd sequence
gatgcgtccggcgtagaggatcgagatctc

SEQ ID NO: 124 - protein, 5 aa, Artificial Sequence
  Synthetic peptide
EAAAK

SEQ ID NO: 125 - protein, 7 aa, Artificial Sequence
  Synthetic peptide
GSGGGGS

SEQ ID NO: 126 - protein, 15 aa, Artificial Sequence
  Synthetic peptide
GGGGSGGGGSGGGGS

SEQ ID NO: 127 - protein, 18 aa, Artificial Sequence
  Synthetic peptide
GGSGGSGGSGGSGGSGGS

SEQ ID NO: 128 - protein, 336 aa, Homo sapiens
SLGTGNRCVKGDSLSLKGETVNDCHAEIISRRGFIRFLYSELMKYNSQTAKDSIFEPAKGGEKLQIKKTVSFHLYISTAPCGDGALFDKSCSDRAMESTESRHYPVFENPKQGKLRTKVENGEGTIPVESSDIVPTWDGIRLGERLRTMSCSDKILRWNVLGLQGALLTHFLQPIYLKSVTLGYLFSQGHLTRAICCRVTRDGSAFEDGLRHPFIVNHPKVGRVSIYDSKRQSGKTKETSVNWCLADGYDLEILDGTRGTVDGPRNELSRVSKKNIFLLFKKLCSFRYRRDLLRLSYGEAKKAARDYETAKNYFKKGLKDMGYGNWISKPQEEKNF

SEQ ID NO: 129 - protein, 336 aa, Artificial Sequence
  Synthetic polypeptide
SLGTGNRCVKGDSLSLKGETVNDCHAEIISRRGFIRFLYSELMKYNSQTAKDSIFEPAKGGEKLQIKKTVSFHLYISTAPCGDGALFDKSCSDRAMESTESRHYPVFENPKQGKLRTKVENGQGTIPVESSDIVPTWDGIRLGERLRTMSCSDKILRWNVLGLQGALLTHFLQPIYLKSVTLGYLFSQGHLTRAICCRVTRDGSAFEDGLRHPFIVNHPKVGRVSIYDSKRQSGKTKETSVNWCLADGYDLEILDGTRGTVDGPRNELSRVSKKNIFLLFKKLCSFRYRRDLLRLSYGEAKKAARDYETAKNYFKKGLKDMGYGNWISKPQEEKNF

SEQ ID NO: 130 - protein, 385 aa, Homo sapiens
QLHLPQVLADAVSRLVLGKFGDLTDNFSSPHARRKVLAGVVMTTGTDVKDAKVISVSTGTKCINGEYMSDRGLALNDCHAEIISRRSLLRFLYTQLELYLNNKDDQKRSIFQKSERGGFRLKENVQFHLYISTSPCGDARIFSPHEPILEEPADRHPNRKARGQLRTKIESGEGTIPVRSNASIQTWDGVLQGERLLTMSCSDKIARWNVVGIQGSLLSIFVEPIYFSSIILGSLYHGDHLSRAMYQRISNIEDLPPLYTLNKPLLSGISNAEARQPGKAPNFSVNWTVGDSAIEVINATTGKDELGRASRLCKHALYCRWMRVHGKVPSHLLRSKITKPNVYHESKLAAKEYQAAKARLFTAFIKAGLGAWVEKPTEQDQFSLT

SEQ ID NO: 131 - protein, 385 aa, Artificial Sequence
  Synthetic polypeptide
QLHLPQVLADAVSRLVLGKFGDLTDNFSSPHARRKVLAGVVMTTGTDVKDAKVISVSTGTKCINGEYMSDRGLALNDCHAEIISRRSLLRFLYTQLELYLNNKDDQKRSIFQKSERGGFRLKENVQFHLYISTSPCGDARIFSPHEPILEEPADRHPNRKARGQLRTKIESGQGTIPVRSNASIQTWDGVLQGERLLTMSCSDKIARWNVVGIQGSLLSIFVEPIYFSSIILGSLYHGDHLSRAMYQRISNIEDLPPLYTLNKPLLSGISNAEARQPGKAPNFSVNWTVGDSAIEVINATTGKDELGRASRLCKHALYCRWMRVHGKVPSHLLRSKITKPNVYHESKLAAKEYQAAKARLFTAFIKAGLGAWVEKPTEQDQFSLT

SEQ ID NO: 132 - protein, 198 aa, Homo sapiens [sequence omitted]

SEQ ID NO: 133 - protein, 208 aa, Petromyzon marinus
MTDAEYVRIHEKLDIYTFKKQFFNNKKSVSHRCYVLFELKRRGERRACFWGYAVNKPQSGTERGIHAEIFSIRKVEEYLRDNPGQFTINWYSSWSPCADCAEKILEWYNQELRGNGHTLKIWACKLYYEKNARNQIGLWNLRDNGVGLNVMVSEHYQCCRKIFIQSSHNQLNENRWLEKTLKRAEKRRSELSIMIQVKILHTTKSPAV

SEQ ID NO: 134 - protein, 229 aa, Unknown [sequence omitted]

SEQ ID NO: 135 - protein, 7 aa, Simian virus 40
PKKKRKV

SEQ ID NO: 136 - protein, 16 aa, Unknown
  Nucleoplasmin bipartite NLS sequence
KRPAATKKAGQAKKKK

SEQ ID NO: 137 - protein, 9 aa, Unknown
  C-myc NLS sequence
PAAKRVKLD

SEQ ID NO: 138 - protein, 11 aa, Unknown
  C-myc NLS sequence
RQRRNELKRSP

SEQ ID NO: 139 - protein, 38 aa, Homo sapiens
NQSSNFGPMKGGNFGGRSSGPYGGGGQYFAKPRNQGGY

SEQ ID NO: 140 - protein, 42 aa, Unknown
  IBB domain from importin-alpha sequence
RMRIZFKNKGKDTAELRRRRVEVSVELRKAKKDEQILKRRNV

SEQ ID NO: 141 - protein, 8 aa, Unknown
  Myoma T protein sequence
VSRKRPRP

SEQ ID NO: 142 - protein, 8 aa, Unknown
  Myoma T protein sequence
PPKKARED

SEQ ID NO: 143 - protein, 8 aa, Homo sapiens
PQPKKKPL

SEQ ID NO: 144 - protein, 12 aa, Mus musculus
SALIKKKKKMAP

SEQ ID NO: 145 - protein, 5 aa, Influenza virus
DRLRR

SEQ ID NO: 146 - protein, 7 aa, Influenza virus
PKQKKRK

SEQ ID NO: 147 - protein, 10 aa, Hepatitis delta virus
RKLKKKIKKL

SEQ ID NO: 148 - protein, 10 aa, Mus musculus
REKKKFLKRR

SEQ ID NO: 149 - protein, 20 aa, Homo sapiens
KRKGDEVDGVDEVAKKKSKK

SEQ ID NO: 150 - protein, 17 aa, Homo sapiens
RKCLQAGMNLEARKTKK

SEQ ID NO: 151 - DNA, 12 bp, Artificial Sequence
  Synthetic oligonucleotide
vkrbtytraaac

SEQ ID NO: 152 - DNA, 30 bp, Artificial Sequence
  Synthetic oligonucleotide
cacccgtgcaaaattgcaggggtctaaaac

SEQ ID NO: 153 - DNA, 30 bp, Artificial Sequence
  Synthetic oligonucleotide
cactggtgcaaatttgcactagtctaaaac

SEQ ID NO: 154 - DNA, 8 bp, Artificial Sequence
  Synthetic oligonucleotide
  modified_base (2)..(2): a, c, t, g, unknown or other
  modified_base (4)..(4): a, c, t, g, unknown or other
tntnaaac

SEQ ID NO: 155 - protein, 128 aa, Bacteriophage PP7
MSKTIVLSVGEATRTLTEIQSTADRQIFEEKVGPLVGRLRLTASLRQNGAKTAYRVNLKLDQADVVDCSTSVCGELPKVRYTQVWSHDVTIVANSTEASRKSLYDLTKSLVVQATSEDLVVNLVPLGR

SEQ ID NO: 156 - protein, 1437 aa, Unknown
  LbaCas13a sequence
MKISKVREENRGAKLTVNAKTAVVSENRSQEGILYNDPSRYGKSRKNDEDRDRYIESRLKSSGKLYRIFNEDKNKRETDELQWFLSEIVKKINRRNGLVLSDMLSVDDRAFEKAFEKYAELSYTNRRNKVSGSPAFETCGVDAATAERLKGIISETNFINRIKNNIDNKVSEDIIDRIIAKYLKKSLCRERVKRGLKKLLMNAFDLPYSDPDIDVQRDFIDYVLEDFYHVRAKSQVSRSIKNMNMPVQPEGDGKFAITVSKGGTESGNKRSAEKEAFKKFLSDYASLDERVRDDMLRRMRRLVVLYFYGSDDSKLSDVNEKFDVWEDHAARRVDNREFIKLPLENKLANGKTDKDAERIRKNTVKELYRNQNIGCYRQAVKAVEEDNNGRYFDDKMLNMFFIHRIEYGVEKIYANLKQVTEFKARTGYLSEKIWKDLINYISIKYIAMGKAVYNYAMDELNASDKKEIELGKISEEYLSGISSFDYELIKAEEMLQRETAVYVAFAARHLSSQTVELDSENSDFLLLKPKGTMDKNDKNKLASNNILNFLKDKETLRDTILQYFGGHSLWTDFPFDKYLAGGKDDVDFLTDLKDVIYSMRNDSFHYATENHNNGKWNKELISAMFEHETERMTVVMKDKFYSNNLPMFYKNDDLKKLLIDLYKDNVERASQVPSFNKVFVRKNFPALVRDKDNLGIELDLKADADKGENELKFYNALYYMFKEIYYNAFLNDKNVRERFITKATKVADNYDRNKERNLKDRIKSAGSDEKKKLREQLQNYIAENDFGQRIKNIVQVNPDYTLAQICQLIMTEYNQQNNGCMQKKSAARKDINKDSYQHYKMLLLVNLRKAFLEFIKENYAFVLKPYKHDLCDKADFVPDFAKYVKPYAGLISRVAGSSELQKWYIVSRFLSPAQANHMLGFLHSYKQYVWDIYRRASETGTEINHSIAEDKIAGVDITDVDAVIDLSVKLCGTISSEISDYFKDDEVYAEYISSYLDFEYDGGNYKDSLNRFCNSDAVNDQKVALYYDGEHPKLNRNIILSKLYGERRFLEKITDRVSRSDIVEYYKLKKETSQYQTKGIFDSEDEQKNIKKFQEMKNIVEFRDLMDYSEIADELQGQLINWIYLRERDLMNFQLGYHYACLNNDSNKQATYVTLDYQGKKNRKINGAILYQICAMYINGLPLYYVDKDSSEWTVSDGKESTGAKIGEFYRYAKSFENTSDCYASGLEIFENISEHDNITELRNYIEHFRYYSSFDRSFLGIYSEVFDRFFTYDLKYRKNVPTILYNILLQHFVNVRFEFVSGKKMIGIDKKDRKIAKEKECARITIREKNGVYSEQFTYKLKNGTVYVDARDKRYLQSIIRLLFYPEKVNMDEMIEVKEKKKPSDNNTGKGYSKRDRQQDRKEYDKYKEKKKKEGNFLSGMGGNINWDEINAQLKN

SEQ ID NO: 157 - protein, 1159 aa, Unknown
  LbuCas13a sequence
MKVTKVGGISHKKYTSEGRLVKSESEENRTDERLSALLNMRLDMYIKNPSSTETKENQKRIGKLKKFFSNKMVYLKDNTLSLKNGKKENIDREYSETDILESDVRDKKNFAVLKKIYLNENVNSEELEVFRNDIKKKLNKINSLKYSFEKNKANYQKINENNIEKVEGKSKRNIIYDYYRESAKRDAYVSNVKEAFDKLYKEEDIAKLVLEIENLTKLEKYKIREFYHEIIGRKNDKENFAKIIYEEIQNVNNMKELIEKVPDMSELKKSQVFYKYYLDKEELNDKNIKYAFCHFVEIEMSQLLKNYVYKRLSNISNDKIKRIFEYQNLKKLIENKLLNKLDTYVRNCGKYNYYLQDGEIATSDFIARNRQNEAFLRNIIGVSSVAYFSLRNILETENENDITGRMRGKTVKNNKGEEKYVSGEVDKIYNENKKNEVKENLKMFYSYDFNMDNKNEIEDFFANIDEAISSIRHGIVHFNLELEGKDIFAFKNIAPSEISKKMFQNEINEKKLKLKIFRQLNSANVFRYLEKYKILNYLKRTRFEFVNKNIPFVPSFTKLYSRIDDLKNSLGIYWKTPKTNDDNKTKEIIDAQIYLLKNIYYGEFLNYFMSNNGNFFEISKEIIELNKNDKRNLKTGFYKLQKFEDIQEKIPKEYLANIQSLYMINAGNQDEEEKDTYIDFIQKIFLKGFMTYLANNGRLSLIYIGSDEETNTSLAEKKQEFDKFLKKYEQNNNIKIPYEINEFLREIKLGNILKYTERLNMFYLILKLLNHKELTNLKGSLEKYQSANKEEAFSDQLELINLLNLDNNRVTEDFELEADEIGKFLDFNGNKVKDNKELKKFDTNKIYFDGENIIKHRAFYNIKKYGMLNLLEKIADKAGYKISIEELKKYSNKKNEIEKNHKMQENLHRKYARPRKDEKFTDEDYESYKQAIENIEEYTHLKNKVEFNELNLLQGLLLRILHRLVGYTSIWERDLRFRLKGEFPENQYIEEIFNFENKKNVKYKGGQIVEKYIKFYKELHQNDEVKINKYSSANIKVLKQEKKDLYIRNYIAHFNYIPHAEISLLEVLENLRKLLSYDRKLKNAVMKSVVDILKEYGFVATFKIGADKKIGIQTLESEKIVHLKNLKKKKLMTDRNSEELCKLVKIMFEYKMEEKKSEN

SEQ ID NO: 158 - protein, 1389 aa, Unknown
  LshCas13a sequence
MGNLFGHKRWYEVRDKKDFKIKRKVKVKRNYDGNKYILNINENNNKEKIDNNKFIRKYINYKKNDNILKEFTRKFHAGNILFKLKGKEGIIRIENNDDFLETEEVVLYIEAYGKSEKLKALGITKKKIIDEAIRQGITKDDKKIEIKRQENEEEIEIDIRDEYTNKTLNDCSIILRIIENDELETKKSIYEIFKNINMSLYKIIEKIIENETEKVFENRYYEEHLREKLLKDDKIDVILTNFMEIREKIKSNLEILGFVKFYLNVGGDKKKSKNKKMLVEKILNINVDLTVEDIADFVIKELEFWNITKRIEKVKKVNNEFLEKRRNRTYIKSYVLLDKHEKFKIERENKKDKIVKFFVENIKNNSIKEKIEKILAEFKIDELIKKLEKELKKGNCDTEIFGIFKKHYKVNFDSKKFSKKSDEEKELYKIIYRYLKGRIEKILVNEQKVRLKKMEKIEIEKILNESILSEKILKRVKQYTLEHIMYLGKLRHNDIDMTTVNTDDFSRLHAKEELDLELITFFASTNMELNKIFSRENINNDENIDFFGGDREKNYVLDKKILNSKIKIIRDLDFIDNKNNITNNFIRKFTKIGTNERNRILHAISKERDLQGTQDDYNKVINIIQNLKISDEEVSKALNLDVVFKDKKNIITKINDIKISEENNNDIKYLPSFSKVLPEILNLYRNNPKNEPFDTIETEKIVLNALIYVNKELYKKLILEDDLEENESKNIFLQELKKTLGNIDEIDENIIENYYKNAQISASKGNNKAIKKYQKKVIECYIGYLRKNYEELFDFSDFKMNIQEIKKQIKDINDNKTYERITVKTSDKTIVINDDFEYIISIFALLNSNAVINKIRNRFFATSVWLNTSEYQNIIDILDEIMQLNTLRNECITENWNLNLEEFIQKMKEIEKDFDDFKIQTKKEIFNNYYEDIKNNILTEFKDDINGCDVLEKKLEKIVIFDDETKFEIDKKSNILQDEQRKLSNINKKDLKKKVDQYIKDKDQEIKSKILCRIIFNSDFLKKYKKEIDNLIEDMESENENKFQEIYYPKERKNELYIYKKNLFLNIGNPNFDKIYGLISNDIKMADAKFLFNIDGKNIRKNKISEIDAILKNLNDKLNGYSKEYKEKYIKKLKENDDFFAKNIQNKNYKSFEKDYNRVSEYKKIRDLVEFNYLNKIESYLIDINWKLAIQMARFERDMHYIVNGLRELGIIKLSGYNTGISRAYPKRNGSDGFYTTTAYYKFFDEESYKKFEKICYGFGIDLSENSEINKPENESIRNYISHFYIVRNPFADYSIAEQIDRVSNLLSYSTRYNNSTYASVFEVFKKDVNLDYDELKKKFKLIGNNDILERLMKPKKVSVLELESYNSDYIKNLIIELLTKIENTNDTL

SEQ ID NO: 159-163 - skipped (5 entries)

SEQ ID NO: 164 - RNA, 11 nt, Artificial Sequence
  Synthetic oligonucleotide
  modified_base (8)..(11): a, c, u, g, unknown or other
cuaaaacnnnn

SEQ ID NO: 165 - RNA, 11 nt, Artificial Sequence
  Synthetic oligonucleotide
  modified_base (8)..(11): a, c, u, g, unknown or other
cuaaaacnnnn

SEQ ID NO: 166 - RNA, 11 nt, Artificial Sequence
  Synthetic oligonucleotide
  modified_base (8)..(11): a, c, u, g, unknown or other
cuaaaacnnnn

SEQ ID NO: 167 - RNA, 11 nt, Artificial Sequence
  Synthetic oligonucleotide
  modified_base (8)..(11): a, c, u, g, unknown or other
cuaaaacnnnn

SEQ ID NO: 168 - RNA, 60 nt, Artificial Sequence
  Synthetic oligonucleotide
  modified_base (31)..(60): a, c, u, g, unknown or other
cacccgugcaaaauugcaggggucuaaaacnnnnnnnnnnnnnnnnnnnnnnnnnnnnnn

SEQ ID NO: 169 - RNA, 36 nt, Unknown
  MS2 binding loop sequence
ggcccaacaugaggaucacccaugucugcaggggcc

SEQ ID NO: 170 - RNA, 29 nt, Unknown
  QBeta binding loop sequence
ggcccaugcugucuaagacagcaugggcc

SEQ ID NO: 171 - protein, 130 aa, Bacteriophage MS2
MASNFTQFVLVDNGGTGDVTVAPSNFANGVAEWISSNSRSQAYKVTCSVRQSSAQKRKYTIKVEVPKVATQTVGGVELPVAAWRSYLNMELTIPIFATNSDCELIVKAMQGLLKDGNPIPSAIAANSGIY

SEQ ID NO: 172 - protein, 133 aa, Bacteriophage Qbeta
MAKLETVTLGNIGKDGKQTLVLNPRGVNPTNGVASLSQAGAVPALEKRVTVSVSQPSRNRKNYKVQVKIQNPTACTANGSCDPSVTRQAYADVTFSFTQYSTDEERAFVRTELAALLASPLLIDAIDQLNPAY

SEQ ID NO: 173 - RNA, 34 nt, Unknown
  PP7 binding loop sequence
ggcccuaaggguuuauauggaaacccuuagggcc

SEQ ID NO: 174-197 - skipped (24 entries)

SEQ ID NO: 198 - protein, 15 aa, Unknown
  WYL domain sequence
  MOD_RES (2)..(3): Any amino acid
  VARIANT (4)..(4): /replace=Val or Ile or Leu or Pro or Phe or Tyr or Met or Trp
  MOD_RES (5)..(13): Any amino acid
  SITE (1)..(15): /note=Variant residues given in the sequence have no preference with respect to those in the annotations for variant positions
PXXCXXXXXXXXXYL

SEQ ID NO: 199 - DNA, 12 bp, Artificial Sequence
  Synthetic oligonucleotide
vddbtytraaac

SEQ ID NO: 200 - protein, 949 aa, Ruminococcus flavefaciens
MSAMTKGLRNCKGCVNMKKKMSLREKREAEKQAKKAAYSAASKNTDSKPAEKKAETPKPAEIISDNSRNKTAVKAAGLKSTIISGDKLYMTSFGKGNAAVIEQKIDINDYSFSAMKDTPSLEVDKAESKEISFSSHHPFVKNDKLTTYNPLYGGKDNPEKPVGRDMLGLKDKLEERYFGCTFNDNLHIQIIYNILDIEKILAVHSANITTALDHMVDEDDEKYLNSDYIGYMNTINTYDVFMDPSKNSSLSPKDRKNIDNSRAKFEKLLSTKRLGYFGFDYDANGKDKKKNEEIKKRLYHLTAFAGQLRQWSFHSAGNYPRTWLYKLDSLDKEYLDTLDHYFDKRFNDINDDFVTKNATNLYILKEVFPEANFKDIADLYYDFIVIKSHKNMGFSIKKLREKMLECDGADRIKEQDMDSVRSKLYKLIDFCIFKYYHEFPELSEKNVDILRAAVSDTKKDNLYSDEAARLWSIFKEKFLGFCDKIVVWVTGEHEKDITSVIDKDAYRNRSNVSYFSKLMYAMCFFLDGKEINDLLTTLINKFDNIANQIKTAKELGINTAFVKNYDFFNHSEKYVDELNIVKNIARMKKPSSNAKKAMYHDALTILGIPEDMDEKALDEELDLILEKKTDPVTGKPLKGKNPLRNFIANNVIENSRFIYLIKFCNPENVRKIVNNTKVTEFVLKRIPDAQIERYYKSCTDSEMNPPTEKKITELAGKLKDMNFGNFRNVRQSAKENMEKERFKAVIGLYLTVVYRVVKNLVDVNSRYIMAFHSLERDSQLYNVSVDNDYLALTDTLVKEGDNSRSRYLAGNKRLRDCVKQDIDNAKKWFVSDKYNSITKYRNNVAHLTAVRNCAEFIGDITKIDSYFALYHYLIQRQLAKGLDHERSGFDRNYPQYAPLFKWHTYVKDVVKALNAPFGYNIPRFKNLSIDALFDRNEIKKNDGEKKSDD

SEQ ID NO: 201 - protein, 1043 aa, Unknown
  arthropoda-digestive system-cubitermes and nasutitermes termite gut sequence
MGVKSVLAHGKDEKGHIKLAITAFGKGNKAELAIQTDEKGSNLAKTYKERNITANKIVSEGIQTSGTIAGEGHATFLNNPAEHVGTDYLKLKETLEMEFFGKSFPGDSVRIQIIHQILDIQKLLGIYITDIIYCINNLRDETHLDHESDIVGLSMSNTNVNLALNQMRPYFGFFGEAFRPVGDDKVKEITLSDEVRKNIEKIIALEEQKRNPSTPRFKQENINLEIENAMGKFKSKDAFETAKKKYNRIVADETNAKTLRILGAMRQITAHFKDQATLFMSDVELPKILKKEFSKADWQTVEDYYAKLVDRINEGFCKNAATNVHFLTELLPEESKKQLTEDYFRFAILKEGKNLGVNMKRLREVMFALFVPELTAPETKKRYDSYRAKIYGLTDFLLFKHIHNTKQLEEWVAVLRETSNEDAKENLYDEFARTAWNTVGDSAKQLIENMQSYFTKKEKEITKTAQPVLSTSSIAHTSKKITQFSSFAKLLAFLCNFWEGKEINELLSAYIHKFENIQEFINLLEKLEGKKPQFTENYALFNEAAGQRAGEIAQNLRILASIGKMKPDLGDAKRQLYKAAIEMLGIDTEEYISDEWLEPNMLLAQPPKEPKKDNEKYRKEPHKYSYEKDMETYRKKLREYEETWRSLIDYEYLMPETNPFRNFVAKQVIESRRFMYLVRYTKPKTVRALMSNRAIVHYVLSRIADIQDHHMTESQIDRYYQNLPQYNEQQHKNVSLETKIDALADYLCKYTFEKNVLKQKNGIVLNTKSATKNVEIEHLKALTGLYLTVAYIAVKNLVKANARYYIAFSIFERDYALFEKKLGKDTLEKYVKPFKYIDKGEEKEGKNNFFALTEYLLDKDNSLRYQWNNDLSDEENKQALRKHLDKKEIRSQRHFSQYWLDIFARQIENAKKTSESGYLLTAARNCALHLNVLTALPEFVGEFRKTGDKMTSYFELYHFLLQKLMLAEAGLNLDEYRERIDTYQTACKDLINITYVSLGYNLPRYKNLTCEPLFDEESATGKERQTRLDEKSKEKKQRKGGQK

SEQ ID NO: 202 - protein, 921 aa, Unknown
  gut metagenome sequence
MAKKNKMKPRERREAQKKARQLKAAEINNNAVPAIAAMHAAEVIAPAAEKKKSSVKAAGMKSILVSENKMYITSFGKGNSAVLEYEVDNNDYNQTQLSSKDNSNIELCGVTKVNITFSSKHGFESGVEINTSNPTHRSGESSPVRGDMLGLKSELEKRFFGKTFDDNIHIQLIYNILDIEKILAVYVTNIVYALNNMLGEGDESNYDFMGYLSTFNTYKVFTNPNGSTLSDDKKENIRKSLSKFNALLKTKRLGYFGLEEPKTKDTRASEAYKKRVYHMLAIVGQIRQCVFHDKSGAKRFDLYSFINNIYPEYRDTLDYLVEERLKSINKDFIQGNKVNISLLIDMMKGYEADDIIRLYYDFIVLKSQKNLGFSIKKLREKMLDEYGFRFKDKQYDSVRSKMYKLMDFLLFCNYYRNDVVAGEALVRKLRFSMTDDEKEGIYADEAAKLWGKFRNDFENIADHMNGDVIKELGKADMDFDEKILDSEKKNASDLLYFSKMIYMLTYFLDGKEINDLLTTLISKFDNIKEFLKIMKSSAVDVECELTAGYKLFNDSQRITNELFIVKNIASMRKPAASAKLTMFRDALTILGIDDKITDDRISEILKLKEKGKGIHGLRNFITNNVIESSRFVYLIKYANAQKIREVAKNEKVVMFVLGGIPDTQIERYYKSCVEFPDMNSSLEAKRSELARMIKNISFDDFKNVKQQAKGRENVAKERAKAVIGLYLTVMYLLVKNLVNVNARYVIAIHCLERDFGLYKEIIPELASKNLKNDYRILSQTLCELCDDRDESPNLFLKKNKRLRKCVEVDINNADSSMTRKYRNCIAHLTVVRELKKYIGDIRTVDSYFSIYHYVMQRCITKREDDTKQEEKIKYEDDLLKNHGYTKDFVKALNSPFGYNIPRFKNLSIEQLFDRNEYLTEK

SEQ ID NO: 203 - protein, 922 aa, Unknown
  gut metagenome sequence
MAKKNKMKPRELREAQKKARQFKAAEINNNAAPAIAAMPAAEVIAPVAEKKKSSVKAAGMKSILVSENKMYITSFGKGNSAVLEYEVDNNDYNKTQLSSKDNSNIELCGVNEVNITFSSKHGFESGVEINTSNPTHRSGESSPVRWDMLGLKSELEKRFFGKTFDDNIHIQLIYNILDIEKILAVYVTNIVYALNNMLGVKGSESHDDFIGYLSTNNIYDVFIDPDNSSLSDDKKANVRKSLSKFNVLLKTKRLGYFGLEEPKTKDTRVSQAYKKRVYHMLAIVGQIRQCVFHDKSGAKRFDLYSFINNIDPEYRETLDYLVDERFDSINKGFIQGNKVNISLLIDMMKGYEADDIIRLYYDFIVLKSQKNLGFSIKKLREKMLEEYGYRFKDKQYDSVRSKMYKLMDFLLFCNYYRNDVVAGEALVRKLRFSMTDDEKEGIYADEASKLWGKFRNDFENIADHMNGDVIKELGKADMDFDEKILDSEKKNASDLLYFSKMIYMLTYFLDGKEINDLLTTLISKFDNIKEFLKIMKSSAVDVECELTAGYKLFNDSQRITNELFIVKNIASMRKPASSAKLTMFRDALTILGIDDNITDDRISEILKLKEKGKGIHGLRNFITNNVIESSRFVYLIKYANAQKIREVAKNEKVVMFVLGGIPDTQIERYYKSCVEFPDMNSSLEVKRSELARMIKNISFDDFKNVKQQAKGRENVAKERAKAVIGLYLTVMYLLVKNLVNVNARYVIAIHCLERDFGLYKEIIPELASKNLKNDYRILSQTLCELCDNGDESPNLFLKKNKRLRKCVEVDINNADSNMTRKYRNCIAHLTVVRELKEYIGDIRTVDSYFSIYHYVMQRCITKREDDTKQEEKIKYEDDLLKNHGYTKDFVKALNSPFGYNIPRFKNLSIEQLFDRNEYLTEK

SEQ ID NO: 204 - protein, 911 aa, Unknown
  gut metagenome sequence
MKQNDRENNNKIKKSAAKAVGVKSLARLSDGSTVVSSFGKGAAAELESLITGGEIRKLSDKAILEITDDTQNKNAYNVKSSRIPNLTARTDKLSDKSGMDDLGFKRELELEVFGQCFDDSIHIQIAHAVFDIQKSLAAVIPNVLYTLNNLDRSYSTDNTSDKKDIIGNTLNYQHSYESFNVEKRGEFTEYYNAAKDRFSYFPDILCVLEKVNGKDRYQPKSEKDAFNVLSSVNMLRNSLFHFAPKSNDGKARIAVFKNQFDSDFSHITSTVNKIYSAKIAGVNENFLNNEGNNLYIILKATNWDIKKIVPQLYRFSVLKSDKNMGFNMRKLREFAVESKNIDLSRLNDKFLTNNRKKLYKVIDFIIYYHLNKVLKDSFVDDFVAALRASQSEEEKEKLYAQYSERLFADEGLKSAIKKAVDMISDTKSNIFKMKTPLDKALIENIKVNSDASDFCKLIYVFTRFLDGKEINILLNSLIKKFQDIHSFNTTVKKLSENNLIINADYVDDYSLFEQSGTVARELMLIKSISKMDFGLDNINLSFMYDDALRTLGVSDENLPEVKREYFGKTKNLSAYIRNNVLENRRFKYVIKYIHPSDVQKIACNKAIAGFVLNRMPDTQIKRYYDSLINKGATDIQAQAKALLDCITGISFDAIKDDKHLHKSKEKSPQRSADRERKKAMLTLYYTIVYIFVKQMLHINSLYTIGFFYLERDQRFIYSRAKKENKNPSKNSYLNDFRSVTAYFIPSEIMKRIEKNENKGFLEDFEALWNSCGKTSRLRKEDVLLYARYISPDHALKNYKMILNSYRNKIAHINVIMSAGKYTGGIKRMDSYFSVFQHLVQCDILSNPNNKGKCFESESLKPLLLDMKFDGTDEKLYSKRLTRALNIPFGYNVPRYKNLTFEKIYLKSSINE

SEQ ID NO: 205 - protein, 947 aa, Unknown
  gut metagenome sequence
MAKKSKGMKPKEKRELEKQKRIQKAVVKSADDTPVKAEATKAVSVNTDLSVENKHNKKSAAKALGLKSGLVIGDDLYLTSFGRGNEAKLEKKISGETVENLGIGAFEVTERDESTLTLESGRIKDKTARPKDPRHITVDAQGKFKEDMLGIRSVLEEKIFVGKKFNDNIHVQLAYNILDIEKIMAQYVSDIVYMLHNTDKTERNDNLMGYMSIQNPYSVFCNPNFSAAKTQRNVVRQKQELDNIIKSGRLGYFGEAFMVYSGNSSKLRPEKEIYHIFALMASLRQSYFHGYVKDTDYQGPTWPYTLEDKLKDPSHEFRETLDKIFDEGFSKISKNFGKQNNVNLQILEEMLGELYGSTDSKSLACDYYDFIQLKKHKYLGFSIKRLRETMLETTPAACYKAECYNSIRHKLYLLIDFLIYDLYYNRKPARIEEIVDKLRESVNDEEKESIYSAETKYVYEALGKVLVRSLKKYLNGATIRDLKNRYDAKTANRIWDISEHSKSGHVNCFCKLIYMMTLMLDGKEINDLLTTLVNKFDNIASFIDVMDELGLEHSFTDNYKMFADSKAICLDLQFINSFARMSKIDDEKSKRQLFRDALVVLDIGDKNEDWIEKYLTSDIFKRDENGNKIDGEKRDFRNFIANNVIKSARFKYLVKYSSADGMIKLKKNEKLISFVLEQLPETQIDRYYESCGLDCAVADRKVRIEKLTGLIRDMRFDNFRGVNYSNDACKKDKQAKAKYQAIISLYLMVLYQIVKNMIYVNSRYVIAFHCLERDLLFFNIELDNSYQYSNCNELTDMFIKDKYMKEGALGFNMKAGRYLTKNIGNCSNELRKIYRNQVDHFAVVRKIGNYAADIKSIGSWFELYHYVMQRIVFDEYRFALNNTESNYKNSIIKHHTYCKDMVKALNTPFGYDLPRYQNLSIGDLFDRNNYLNKTKESIETKSPIDNP

SEQ ID NO: 206 - protein, 955 aa, Unknown
  gut metagenome sequence
MVQREGCVMAKKSKGMKPKEKRELEKQKRIQKAVVKSADDTPVKAEATKAVSVNTDLSVENKHNKKSAAKALGLKSGLVIGDDLYLTSFGRGNEAKLEKKISGETVENLGIGAFEVTERDESTLTLESGRIKDKTARPKDPRHITVDAQGKFKEDMLGIRSVLEEKIFVGKKFNDNIHVQLAYNILDIEKIMAQYVSDIVYMLHNTDKTERNDNLMGYMSIQNPYSVFCNPNFSAAKTQRNVVRQKQELDNIIKSGRLGYFGEAFMVYSGNSSKLRPEKEIYHIFALMASLRQSYFHGYVKDTDYQGPTWPYTLEDKLKDPSHEFRETLDKIFDEGFSKISKNFGKQNNVNLQILEEMLGELYGSTDSKSLACDYYDFIQLKKHKYLGFSIKRLRETMLETTPAACYKAECYNSIRHKLYLLIDFLIYDLYYNRKPARIEEIVDKLRESVNDEEKESIYSAETKYVYEALGKVLVRSLKKYLNGATIRDLKNRYDAKTANRIWDISEHSKSGHVNCFCKLIYMMTLMLDGKEINDLLTTLVNKFDNIASFIDVMDELGLEHSFTDNYKMFADSKAICLDLQFINSFARMSKIDDEKSKRQLFRDALVVLDIGDKNEDWIEKYLTSDIFKRDENGNKIDGEKRDFRNFIANNVIKSARFKYLVKYSSADGMIKLKKNEKLISFVLEQLPETQIDRYYESCGLDCAVADRKVRIEKLTGLIRDMRFDNFRGVNYSNDACKKDKQAKAKYQAIISLYLMVLYQIVKNMIYVNSRYVIAFHCLERDLLFFNIELDNSYQYSNCNELTDMFIKDKYMKEGALGFNMKAGRYLTKNIGNCSNELRKIYRNQVDHFAVVRKIGNYAADIKSIGSWFELYHYVMQRIVFDEYRFALNNTESNYKNSIIKHHTYCKDMVKALNTPFGYDLPRYQNLSIGDLFDRNNYLNKTKESIETKSPIDNP

SEQ ID NO: 207 - protein, 824 aa, Unknown
  gut metagenome sequence
MAKKIKPRDLRESKRQEKLAAYSVKANEKKTVHTTEEKPAAVLTVTASENKKNKKTSNKAAGLKSTLVYGNKLYITSFGKGNEAIIEQKVDTSDYSFSDVRSDPSLKIKSADDVSISFSSERPFINKSLLTAVNPLHSGKDKPKRAAGQDMLGLKSELEKRYFGKTFDDNIHIQLIHNILDIEKIFAVYSANIVAALDHMIDGDDKEYLENDFIGYMNTLNTYEVFMDPSKVFSDCDNRKKNIDKSREKFETLIDSKRLRYFGFEYDPDGKNKNEEMKKRLYHLVAFAGQLRQWSFHSEGNFQLEWLYKLDDSRIAQEYRDTLDYFFDRRFDELNNNFVEQNATNLFILKETFPGEDLKAVTDLYYDFIIVKSQKNIGFSIKKLREKMLGTEEAAPIKAHDMDSYRPKLYKLIDFCIFKHYHEYTEISEKNVDTLRAAVSEEQKESFYADEAKRLWGIFDKQFLGFCKKINVWVNGSHEKEILGYIDKDAYRRKSDVSYFSKFLYAMSFFLDGKEINDLLTTLINKFDNIASFISTAKELDAEIDRILEKKLDPVTGKPLKGKNSFRNFIANNVIENKRFIYVIKFCNPKNVLKLVKNTKVTEFVLKRMPESQIDRYYSSCIDTEKNPSVDKKISDLAEMIKKIAFDDFRNVRQKTRTREESLEKERFKAVIGLYLTVVYLLIKNLVNVNSRYVMAFHCLERDAKLYGINIGKNYIELTEDLCRENENSRSAYLARNKRLRDCVKQNIDNAKNMKSKEKQRVFFKDYSTVVPFLEKVFYYGSFSSADFEEMDMMKKSKYSYYKRILEYAFGDLLFERKNISKTN

SEQ ID NO: 208 - protein, 1009 aa, Unknown
  gut metagenome sequence
MKKKISLKEQRNTKKAENKLKYQKAQAERAAAAQQTAAGAESEENPCFDVVKDTKRKALNPLHVEIEAPSAKKSSVKANGLKSLLLTDGKTVMTSFGRGSEANVEKRFDETGTKTFDRDPELFSAKPLETGYRIQRFNASPKDAGLAYRPAGVRPDQIGAKAALEKRYFGKETPGDNIHVQIAYQIQDIEKLLAVYISNIIYAVNNVTGVSAMKDSKGRPVDLLGDYGILGEEGLTKRLQRIPEQADEEAKALQAFLCSERLSYFGKEFCLVRNSPKQPDKEEKRQYKLMRVLCLLGELRQFLVHGKKKEKEFAWLYRLDRQLSQEYRKLLGEFYDAQVDKVNKSFLTNSTVNLEVLFRALKTGTDPERKTVTQEYYQFTVRKEDGNLGFSLKTLREILLSAYKHEVRDKEYDSIRHKLYQLFSFALYHYYKTGVGAERREAFVAKLRAVMTAEAKQRAYADEAAEIWNDEGSGIRAAFLEILEAVDFGSAVKGIKARSSVAGDKRFAEWLEEVRIRPEGVSCFTKLMYLLTRFLDGKEINELLTGLINKLENIQSFLDVMQQEHAETGLSDAFSFFEYSGEIAAELRMTRSFARMAAADPEAKRFMVVDGAKLLGFNPKDTESEDEGIIRAIYGDACAEYLQFSEEEKEAFYVQEGLYGKEREKFSPYAYFHTDTSLRNFIAKNVVESARFRYVIRYVSPEIARKYARQEALVRFALHRVPLLQLRRYYQSCCGPKKDPDAAECVDFLAGVVNRVDFANFTDVRTGDSSKSEQEKKQKYQAIVGLYLTVVYWIVKNLVNVNSRYVMAFHILERDTVLLEGKRLFVGGMKAEDPFLLTDGYVSRQDAYVRKRIGENKRANRHGLNCVLENRNALGSDPASTDAAASLIWSYRNAAAHLTAVAAAQEYVSELREIHSYFEVYHYAMQRYLKSGAEFAELVSKNGPASGKIAAWANAVDRCHSFCKDWLWLLNVPFAYNPARYKNLSIANLFDKNEAAPVTEDASEQKEDE

SEQ ID NO: 209 - protein, 918 aa, Unknown
  human gut metagenome sequence
MAKKNKMKPRELREAQKKARQLKAAEINNNAVPAIAAMPAAEAAAPAAEKKKSSVKAAGMKSILVSENKMYITSFGKGNSAVLEYEVDNNDYNKTQLSSKDNSNIELCDVGKVNITFSSRRGFESGVEINTSNPTHRSGESSSVRGDMLGLKSELEKRFFGKNFDDNIHIQLIYNILDIEKILAVYVTNIVYALNNMLGEGDESNYDFMGYLSTFNTYKVFTNPNGSTLSDDKKENIRKSLSKFNALLKTKRLGYFGLEEPKTKDTRASEAYKKRVYHMLAIVGQIRQCVFHDKSGAKRFDLYSFINNIDPEYRETLDYLVDERFDSINKGFIQGNKVNISLLIDMMKGYEADDIIRLYYDFIVLKSQKNLGFSIKKLREKMLDEYGFRFKDKQYDSVRSKMYKLMDFLLFCNYYRNDIAAGESLVRKLRFSMTDDEKEGIYADEAAKLWGKFRNDFENIADHMNGDVIKELGKADMDFDEKILDSEKKNASDLLYFSKMIYMLTYFLDGKEINDLLTTLISKFDNIKEFLKIMKSSAVDVECELTAGYKLFNDSQRITNELFIVKNIASMRKPAASAKLTMFRDALTILGIDDKITDDRISEILKLKEKGKGIHGLRNFITNNVIESSRFVYLIKYANAQKIREVAKNEKVVMFVLGGIPDTQIERYYKSCVEFPDMNSSLGVKRSELARMIKNISFDDFKNVKQQSKGRENVAKERAKAVIGLYLTVMYLLVKNLVNVNARYVIAIHCLERDFGLYKEIIPELASKNLKNDYRILSQTLCELCDKSPNLFLKKNERLRKCVEVDINNADSSMTRKYRNCIAHLTVVRELKEYIGDICTVDSYFSIYHYVMQRCITKRENDTKQEEKIKYEDDLLKNHGYTKDFVKALNSPFGYNIPRFKNLSIEQLFDRNEYLTEK

SEQ ID NO: 210 - protein, 921 aa, Unknown
  human gut metagenome sequence
MAKKNKMKPRELREAQKKARQLKAAEINNNAAPAIAAMPAAEAEKKKSSVKAAGMKSILVSENKMYITSFGKGNSAVLEYEVDKVDNNVYNQTQLSSKGSSNIKLCGVNEVNITFSSKHGFESGVEINTSNPTHRSGESSPVRGDMLGLKSELEKRFFGKTFDDNIHIQLIYNILDIEKILAVYVTNIVYALNNMLGIKGSESYDDFMGYLSARNTYEVFTHPDKSSLSDDKKANVRKSLSKFNVLLKTKRLGYFGLEEPKTKDTRVSQAYKKRVYHMLAIVGQIRQSVFHDKSSKLHEDLYSFIDIIDSEYRETLDYLVDERFDSINKGFIQGNKVNISLLIDMMKDDYEADDIIRLYYDFIVLKSQKNLGFSIKKLREKMLDEYGFRFKDKQYDSVRSKMYKLMDFLLFCNYYRNDVIAGEALVRKLRFSMTDDEKEGIYADEAAKLWGKFRNDFENIADHMNGDVIKELGKADMDFDEKILDSEKKNASDLLYFSKMIYMLTYFLDGKEINDLLTTLISKFDNIKEFLKIMKSSAVDVECELTAGYKLFNDSQRITNELFIVKNIASMRKPAASAMLTMFRDALTILGIDDKITDDRISEILKLKEKGKGIHGLRNFITNNVIESSRFVYLIKYANAQKIREVAKNEKVVMFVLGGIPDTQIERYYKSCVEVPDMNSSLEAKRSELARMIKSISFDDFKNVKQQAKGRENVAKEMAKAVIGLYLTVMYLLVKNLVNVNARYVIAIHCLERDFGLYKEIISELASKNLKNDYRILSQTLCELCDNCDESPNLFLKKNKRLRKCVEVDINNADSSMTRKYRNCIAHLTVVRELKEYIGDIRTVDSYFSIYHYVMQRCITKREDDKKQEEKIKYEDDLLKNHGYTKDFVKALNSPFGYNIPRFKNLSIEQLFDRNEYLTEK

SEQ ID NO: 211 - protein, 923 aa, Unknown
  human gut metagenome sequence
MAKKNKMKPRELREAQKKARQLKAVEINNNAVPEIAAMPAAEVIAPVAEKKKSSVKAAGMKSILVSENKMYITSFGKGNSAVLEYEVDNNDYNKTQLSSKNSSNIELRGVNEVNITFSSKHGFESGVEINTSNPTHRSGESSPVRWDMLGLKSELEKRFFGKTFDDNIHIQLIYNILDIEKILAVYVTNIVYALNNMLGIKGSESYDDFMGYLSARNTYEVFTHPDKSSLSDDKKANVRKSLSKFNVLLKTKRLGYFGLEEPKTKDTRVSQAYKKRVYHMLAIVGQIRQSVFHDKSSKLHEDLYSFIDIIDSEYRETLDYLVDERFDSINKGFIQGNKVNISLLIDMMKDDYEADDIIRLYYDFIVLKSQKNLGFSIKKLREKMLDEYGFRFKDKQYDSVRSKMYKLMDFLLFCNYYRNDVIAGEALVRKLRFSMTDDEKEGIYADEAAKLWGKFRNDFENIADHMNGDVIKELGKADMDFDEKILDSEKKNASDLLYFSKMIYMLTYFLDGKEINDLLTTLISKFDNIKEFLKIMKSSAVDVECELTAGYKLFNDSQRITNELFIVKNIASMRKPAASAKLTMFRDALTILGIDDKITDDRISEILKLKEKGKGIHGLRNFITNNVIESSRFVYLIKYANAQKIREVAKNEKVVMFVLGGIPDTQIERYYKSCVEFPDMNSSLEAKRSELARMIKNIRFDDFKNVKQQAKGRENVAKERAKAVIGLYLTVMYLLVKNLVNVNARYVIAIHCLERDFGLYKEIIPELASKNLKNDYRILSQTLCELCDDRDESPNLFLKKNKRLRKCVEVDINNADSSMTRKYRNCIAHLTVVRELKEYIGDIYAVDSYFSIYHYVMQRCITKRENDTKQEEKIKYEDNLLKNHGYTKDFVKALNSPFGYNIPRFKNLSIEQLFDRNEYLTEK

SEQ ID NO: 212 - protein, 922 aa, Unknown
  human gut metagenome sequence
MAKKNKMKPRELREAQKKARQLKAAEINNNAAPAIAAMPAAEVIAPAAEKKKSSVKAAGMKSIFVSENKMYITSFGKGNSAVLEYEVDNNDYNQTQLSSKGSSNIELHGVNEVNITFSSKHGFGSGVEINTSNPTHRSGESSPVRWDMLGLKSELEKRFFGKTFDDNIHIQLIYNILDIEKILAVYVTNIVYALNNMLGVKGSESYDDFMGYLSARNTYEVFTHPDKSNLSDKAKGNIKKSFSTFNDLLKTKRLGYFGLEEPKTKDTRVSQAYKKRVYHMLAIVGQIRQSVFHDKSSKLDEDLYSFIDIIDPEYRETLDYLVDERFDSINKGFIQGNKVNISLLIDMMKGYEADDIIRLYYDFIVLKSQKNLGFSIKKLREKMLDEYGFRFKDKQYDSVRSKMYKLMDFLLFCNYYRNDVAAGEALVRKLRFSMTDDEKEGIYADEAAKLWGKFRNDFENIADHMNGDVIKELGKADMDFDEKILDSEKKNASDLLYFSKMIYMLTYFLDGKEINDLLTTLISKFDNIKEFLKIMKSSAVDVECELTAGYKLFNDSQRITNELFIVKNIASMRKPAASAKLTMFRDALTILGIDDNITDDRISEILKLKEKGKGIHGLRNFITNNVIESSRFVYLIKYANAQKIREVAENEKVVMFVLGGIPDTQIERYYKSCVEVPDMNSSLEAKRSELARMIKNISFDDFKNVKQQAKGRENVAKERAKAVIGLYLTVMYLLVKNLVNVNARYVIAIHCLERDFGLYKEIIPELASKNLKNDYRILSQTLCELCDDRDESPNLFLKKNKRLRKCVEVDINNADSSMTRKYRNCIAHLTVVRELKEYIGDIRTVDSYFSIYHYVMQRCITKREDDKKQEEKIKYEDDLLKNHGYTKDFVKALNSPFGYNIPRFKNLSIEQLFDRNEYLTEK

SEQ ID NO: 213 - protein, 922 aa, Unknown
  human gut metagenome sequence
MAKKNKMKPRELREAQKKARQLKAAEINNNAAPAIAAMPAAQVIAPAAEKKKSSVKAAGMKSILVSENKMYITSFGKGNSAVLEYEVDKVDNNNYNKTQLSSKDNSNIELGDVNEVNITFSSKHGFESGVEINTSNPTHRSGESSPVRWDMLGLKSELEKRFFGKTFDDNIHIQLIYNILDIEKILAVYVTNIVYALNNMLGIKGSESYDDFMGYLSARNTYEVFTHPDKSNLSDKVKGNIKKSLSKFNDLLKTKRLGYFGLEEPKTKDTRVSQAYKKRVYHMLAIVGQIRQSVFHDKSSKLDEDLYSFIDIIDSEYRETLDYLVDERFDSINKGFIQGNKVNISLLIDMMKGYEADDIIRLYYDFIVLKSQKNLGFSIKKLREKMLDEYGFRFKDKQYDSVRSKMYKLMDFLLFCNYYRNDVVAGEALVRKLRFSMTDDEKEGIYADEASKLWGKFRNDFENIADHMNGDVIKELGKADMDFDEKILDSEKKNASDLLYFSKMIYMLTYFLDGKEINDLLTTLISKFDNIKEFLKIMKSSAVDVECELTAGYKLFNDSQRITNELFIVKNIASMRKPASSAKLTMFRDALTILGIDDNITDDRISEILKLKEKGKGIHGLRNFITNNVIESSRFVYLIKYANAQKIRKVAKNEKVVMFVLGGIPDTQIERYYKSCVEFPDMNSSLEVKRSELARMIKNISFDDFKNVKQQAKGRENVAKERAKAVIGLYLTVMYLLVKNLVNVNARYVIAIHCLERDFGLYKEIIPELASKNLKNDYRILSQTLCELCDKSPNLFLKKNRRLRKCVEVDINNADSSMTRKYRNCIAHLTVVRELKEYIGDIRTVDSYFSIYHYVMQRCITKRENDTKQEEKIKYEDDLLKNHGYTKDFVKALNSPFGYNIPRFKNLSIEQLFDRNEYLTEK

SEQ ID NO: 214 - protein, 796 aa, Unknown
  human gut metagenome sequence
MAKKNKMKPRELREAQKKARQLKAAEINNNAAPAIAAMPAAEAAAPAAEKKKSSVKAAGMKSILVSENKMYITSFGKGNSAVLEYEVDNNDYNQTQLSSKGSSNIELHGVNEVNITFSSKHGFESGVEINTSNPTHRSGESSPVRWDMLGLKSELEKRFFGKTFDDNIHIQLIYNILDIEKILAVYVTNIVYALNNMLGVKGSESHDDFIGYLSTNNTYDVFIDPDNSSLSDDKKANVRKSLSKFNVLLKTKRLGYFGLEEPKTKDTRVSQAYKKRVYHMLAIVGQIRQCVFHDKSGAKRFDLYSFINNIDPEYRETLDYLVDERFDSINKGFIEGNKINISLLIDMMKGYEADDIIRLYYDFIVLKSQKNLGFSIKKLREKMLDEYGFRFKDKQYDPVRSKMYKLMDFLLFCNHYRNDVAAGEALVRKLRFSMTDDEKEGIYADEAAKLWGKFRNDFENIADHMNGDVIKELGKADMDFDEKILDSEKKNASDLLYFSKMIYMLTYFLDGKEINDLLTTLISKFDNIKEFLKIMKSSAVDVECELTAGYKLFNDSQRITNELFIVKNIASMRKPAASAKLTMFRDALTILGIDDNITDDRISEILKLKEKGKGIHGLRNFITNNVIESSRFVYLIKYANAQKIREVAKNEKVVMFVLGGIPDTQIERYYKSCVEFPDMNSSLEAKRSELARMIKNISFDDFKNVKQQAKGRENVAKERAKAVIGLYLTVMYLLVKNLVNVNARYVIAIHCLERDFGLYKEIIPELASKNLKNDYRILSQTLVNFVMIVMSRRICS

SEQ ID NO: 215 - protein, 860 aa, Unknown
  human gut metagenome sequence
MKSILVSKNKMYITSFGKGNSAVLEYEVDNNDYNKTQLSSKDNSNIELRGVTKVNITFSSKHGLESGVEINTSNPTHRSGESSPVRWDMLGLKSELEKRFFGKTFDDNIHIQLIYNILDIEKILAVYVTNIVYALNNMLGVKGSESHDDFIGYLSTNNTYDVFIDPDNSSLSDDKKANVRKSLSKFNALLKTKRLGYFGLEEPKTKDNRVSEAYKKRVYHMLAIVGQIRQCVFHDKSGAKRFDLYSFINNIDPEYRETLDYLVDERFDSINKDFIQGNKVNISLLIDMMKGYEADDIIRLYYDFIVLKSQKNLGFSIKKLREKMLDEYGFRFKDKQYDSVRSKMYKLMDFLLFCNYYRNDVVAGEALVRKLRFSMTDDEKEGIYADEAAKLWGKFRNDFENIADHMNGDVIKELGKADMDFDEKILDSEKKNASDILYFSKMIYMLTYFLDGKEINDLLTTLISKFDNIKEFLKIMKSSAVDVECELTAGYKLFNDSQRITNELFIVKNIASMRKPAASAKLTMFRDALTILGIDDNITDDRISEILKLKEKGKGIHGLRNFITNNVIESSRFVYLIKYANAQKIREVAKNEKVVMFVLGGIPDTQIERYYKSCVEFPDMNSSLEVKRSELARMIKNISFDDFKNVKQQAKGRENVAKERAKAVIGLYLTVMYLLVKNLVNVNARYVIAIHCLERDFGLYKEIIPELASKNLKNDYRILSQTLCDDRDESPNLFLKKNKRLRKCVEVDINNADSSMTRKYRNCIAHLTVVRELKEYIGDIRTVDTYFSIYHYVMQRCITKREDDTKQEEKIKYEDDLLKNHGYTKDFVKALNSPFGYNIPRFKNLSIEQLFDRNEYLTEK

SEQ ID NO: 216 - protein, 850 aa, Unknown
  human gut metagenome sequence
MYITSFGKGNSAVLEYEVDNNDYNKTQLSSKDNSNIELRGVTKVNITFSSKHGLESGVEINTSNPTHRSGESSPVRWDMLGLKSELEKRFFGKTFDDNIHIQLIYNILDIEKILAVYVTNIVYALNNMLGVKGSESHDDFIGYLSTNNTYDVFIDPDNSSLSDDKKANVRKSLSKFNALLKTKRLGYFGLEEPKTKDNRVSEAYKKRVYHMLAIVGQIRQCVFHDKSGAKRFDLYSFINNIDPEYRETLDYLVDERFDSINKDFIQGNKVNISLLIDMMKGYEADDIIRLYYDFIVLKSQKNLGFSIKKLREKMLDEYGFRFKDKQYDSVRSKMYKLMDFLLFCNYYRNDVVAGEALVRKLRFSMTDDEKEGIYADEAAKLWGKFRNDFENIADHMNGDVIKELGKADMDFDEKILDSEKKNASDILYFSKMIYMLTYFLDGKEINDLLTTLISKFDNIKEFLKIMKSSAVDVECELTAGYKLFNDSQRITNELFIVKNIASMRKPAASAKLTMFRDALTILGIDDNITDDRISEILKLKEKGKGIHGLRNFITNNVIESSRFVYLIKYANAQKIREVAKNEKVVMFVLGGIPDTQIERYYKSCVEFPDMNSSLEVKRSELARMIKNISFDDFKNVKQQAKGRENVAKERAKAVIGLYLTVMYLLVKNLVNVNARYVIAIHCLERDFGLYKEIIPELASKNLKNDYRILSQTLCDDRDESPNLFLKKNKRLRKCVEVDINNADSSMTRKYRNCIAHLTVVRELKEYIGDIRTVDTYFSIYHYVMQRCITKREDDTKQEEKIKYEDDLLKNHGYTKDFVKALNSPFGYNIPRFKNLSIEQLFDRNEYLTEK

SEQ ID NO: 217 - protein, 955 aa, Unknown
  human gut metagenome sequence
MAKKKRITAKERKQNHRELLMKKADSNAEKEKAKKPVVENKPDTAISKDNTPKPNKEIKKSKAKLAGVKWVIKANDDVAYISSFGKGNNSVLEKRIMGDVSSNVNKDSHMYVNPKYTKKNYEIKNGFSSGSSLVTYPNKPDKNSGMDALCLKPYFEKDFFGHIFTDNMHIQAIYNIFDIEKILAKHITNIIYTVNSFDRNYNQSGNDTIGFGLNYRVPYSEYGGGKDSNGEPKNKFKWEKRDNFSKFYNESKPHLGYYENIFYDHGEPISEEKFYNYLNILNFIRNNTFHYKDNDIELYSENYSEEYVFINCLNKFVKNKFKNVNKNFISNEKNNLYIILNAYGKDTENVEVVKKYSKELYKLSVLKTNKNLGVNVKKLRESAIEYGYCPLPYDKEKEVAKLSSVKHKLYKTYDFVITHYLNSNDKILLEIVEALRLSKNDDEKENVYKKYAEKLFKADDVINPIKAISKLFVEKGNKLFKEKIIIKKEYIEDVSIDKNIYDFTKVIFFMTCFLDGKEINDLLTNIISKLQIIEDHNNVIKFISHNKDAVYKDYSDKYAIFRNAGKIATELEAIKSIARMENKIENASQEPLLNDALLSLGVSDDTKVLENTYKKYFDSKEKTDKQSQKVSTFLMNNVINNNRFKYVIKYINPADINGLAKNRYLVKFVLSKIPEEQIDSYYKLFSNEEEPGCEEKIKLLTKKISKLNFQTLFENNKIPNVEKEKKKAIITLYFTIVYILVKNLVNINGLYTLALYFVERDGYFYKDICGKKDKKKSYNDVDYLLLPEIFSGSKYREETKNLKLPKEKDRDIMKKYLPNDKDREKYNKFFTAYRNNIVHLNIIAKLSELTKNIDKDINSYFDIYHYCTQRVMFNYCKEKNDVVLAKMKDLAHIKSDCNEFSSKHTYPFSSAVLRFMNLPFAYNVPRFKNLSYKKFFDKQWLKHYENLNDFIRILY

SEQ ID NO: 218 - protein, 939 aa, Unknown
  human gut metagenome sequence
MAKKKRITAKERKQNHRELLMKKADSNAEKEKAKKPVVENKPDTAISKDNTPKPNKEIKKSKAKLAGVKWVIKANDDVAYISSFGKGNNSVLEKRIMGDVSSNVNKDSHMYVNPKYTKKNYEIKNGFSSGSSLVTYPNKPDKNSGMDALCLKPYFEKDFFGHIFTDNMHIQAIYNIFDIEKILAKHITNIIYTVNSFDRNYNQSGNDTIGFGLNYRVPYSEYGGGKDSNGEPKNKFKWEKRDNFSKFYNESKPHLGYYENIFYDHGEPISEEKFYNYLNILNFIRNNTFHYKDNDIELYSENYSEEYVFINCLNKFVKNKFKNVNKNFISNEKNNLYIILNAYGKDTENVEVVKKYSKELYKLSVLKTNKNLGVNVKKLRESAIEYGYCPLPYDKEKEVAKLSSVKHKLYKTYDFVITHYLNSNDKILLEIVEALRLSKNDDEKENVYKKYAEKLFKADDVINPIKAISKLFVEKGNKLFKEKIIIKKEYIEDVSIDKNIYDFTKVIFFMTCFLDGKEINDLLTNIISKLQIIEDHNNVIKFISHNKDAVYKDYSDKYAIFRNAGKIATELEAIKSIARMENKIENASQEPLLNDALLSLGVSDDTKVLENTYKKYFDSKEKTDKQSQKVSTFLMNNVINNNRFKYVIKYINPADINGLAKNRYLVKFVLSKIPEEQIDSYYKLFSNEEEPGCEEKIKLLTKKISKLNFQTLFENNKIPNVEKEKKKAIITLYFTIVYILVKNLVNINGLYTLALYFVERDGYFYKDICGKKDKKKSYNDVDYLLLPEIFSGSKYREETKNLKLPKEKDRDIMKKYLPNDKDREKYNKFFTAYRNNIVHLNIIAKLSELTKNIDKDINSYFDIYHYCTQRVMFNYCKEKNDVVLAKMKDLAHIKSDCNEFSSKHTYPFSSAVLRFMNLPFAYNVPRFKNLSYKKFFDKQ

SEQ ID NO: 219 - protein, 922 aa, Unknown
  human gut metagenome sequence
MAKKNKMKPRELREAQKKARQLKAAEINNNAAPAIAAMPAAEVIAPAAEKKKSSVKAAGMKSILVSENKMYITSFGKGNSAVLEYEVDNNDYNKTQLSSKDNSNIELGDVDEVNITFSSKHGFGSGVEINTSNPTHRSGESSPVRWDMLGLKSELEKRFFGKTFDDNIHIQLIYNILDIEKILAVYVTNIVYALNNMLGVKGSESHDDFIGYLSTNNTYDVFIDPDNSSLSDDKKANVRKSLSKFNVLLKTKRLGYFGLEEPKTKDTRASEAYKKRVYHMLAIVGQIRQCVFHDKSGAKRFDLYSFINNIDPEYRDTLDYLVDERFDSINKGFIQGNKVNISLLIDMMKGYEADDIIRLYYDFIVLKSQKNLGFSIKKLREKMLEEYGYRFKDKQYDSVRSKMYKLMDFLLFCNYYRNDVVAGEALVRKLRFSMTDDEKEGIYADEAAKLWGKFRNDFENIADHMNGDVIKELGKADMDFDEKILDSEKKNASDLLYFSKMIYMLTYFLDGKEINDLLTTLISKFDNIKEFLKIMKSSAVNVECELTAGYKLFNDSQRITNELFIVKNIASMRKPAASAKLTMFRDALTILGIDDKITDDRISEILKLKEKGKGIHGLRNFITNNVIESSRFVYLIKYANAQKIREVAKNEKVVMFVLGGIPDTQIERYYKSCVEFPDMNSSLEVKRSELARMIKNISFDDFKNVKQQAKGRENVAKERAKAVIGLYLTVMYLLVKNLVNVNARYVIAIHCLERDFGLYKEIIPELASKNLKNDYRILSQTLCELCDNRDESPNLFLKKNKRLRKCVEVDINNADSSMTRKYRNCIAHLTVVRELKEYIGDIRTVDSYFSIYHYVMQRCITKREDDKKQEEKIKFEDDLLKNHGYTKDFVKALNSPFGYNIPRFKNLSIEQLFDRNEYLTEK

SEQ ID NO: 220 - protein, 922 aa, Unknown
  human gut metagenome sequence
MAKKNKMKPRELREAQKKARQLKAAEINNNAAPAIAAMPAAEVIAPAAEKKKSSVKAAGMKSILVSENKMYITSFGKGNSAVLEYEVDNNDYNKTQLSSKYNSNIELGDVNEVNITFSSKHGFGSGMKINTSNPTHRSGESSPVRWDMLGLKSELEKRFFGKTFDDNIHIQLIYNILDIEKILAVYVTNIVYALNNMLGVKGSESHDDFIGYLSTNNIYDVFIDPDNSSLSDDKKANVRKSLSKFNVLLKTKRLGYFGLEEPKTKDNRVSEAYKKRVYHMLAIVGQIRQCVFHDKSGAKRFDLYSFINNIDPEYRDTLDYLVEERLKSINKDFIQGNKVNISLLIDMMKGYEADDIIRLYYDFIVLKSQKNLGFSIKKLREKMLEEYGFRFKDKQYDSVRSKMYKLMDFLLFCNYYRNDVVAGEALVRKLRFSMTDDEKEGIYADEAAKLWGKFRNDFENIADHMNGDVIKELGKADMDFDEKILDSEKKNASDLLYFSKMIYMLTYFLDGKEINDLLTTLISKFDNIKEFLKIMKSSAVDVECELTAGYKLFNDSQRITNELFIVKNIASMRKPAASAKLTMFRDALTILGIDDNITDDRISEILKLKEKGKGIHGLRNFITNNVIESSRFVYLIKYANAQKIREVAKNEKVVMFVLGGIPDTQIERYYKSCVEFPDMNSSLEAKRSELARMIKNISFDDFKNVKQQAKGRENVAKERAKAVIGLYLTVMYLLVKNLVNVNARYVIAIHCLERDFGLYKEIIPELASKNLKNDYRILSQTLCELCDDRDESPNLFLKKNKRLRKCVEVDINNADSSMTRKYRNCIAHLTVVRELKEYIGDIRTVDSYFSIYHYVMQRCITKREDDTKQEDKIKYEDDLLKNHGYTKDFVKALNSPFGYNIPRFKNLSIEQLFDRNEYLTEK

SEQ ID NO: 221 - protein, 955 aa, Unknown
  human gut metagenome sequence
MAKKKRITAKERKQNHRELLMKKADSNAEKEKAKKPVVENKPDTAISKDNTPKPNKEIKKSKAKLAGVKWVIKANDDVAYISSFGKGNNSVLEKRIMGDVSSNVNKDSHMYVNPKYTKKNYEIKNGFSSGSSLVTYPNKPDKNSGMDALCLKPYFEKDFFGHIFTDNMHIQAIYNIFDIEKILAKHITNIIYTVNSFDRNYNQSGNDTIGFGLNYRVPYSEYGGGKDSNGEPKNQSKWEKRDNFIKFYNESKPHLGYYENIFYDHGEPISEEKFYNYLNILNFIRNNTFHYKDDDIELYSENYSEEFVFINCLNKFVKNKFKNVNKNFISNEKNNLYIILNAYGKDTENVEVVKKYSKELYKLSVLKTNKNLGVNVKKLRESAIEYGYCPLPYDKEKEVAKLSSVKHKLYKTYDFVITHYLNSNDKLLLEIVETLRLSKNDDEKENVYKKYAEKLFKADDVINPIKAISKLFARKGNKLFKEKIIIKKEYIEDVSIDKNIYDFTKVIFFMTCFLDGKEINDLLTNIISKLQVIEDHNNVIKFISNNKDAVYKDYSDKYAIFRNAGKIATELEAIKSIARMENKIENAPQEPLLKDALLSLGVSDDTKVLENTYNKYFDSKEKTDKQSQKVSTFLMNNVINNNRFKYVIKYINPADINGLAKNRYLVKFVLSKIPEEQIDSYYKLFSNEEEPGCEEKIKLLTKKISKLNFQTLFENNKIPNVEKEKKKAIITLYFTIVYILVKNLVNINGLYTLALYFVERDGYFYKDICGKKDKKKSYNDVDYLLLPEIFSGSKYREETKNLKLPKEKDRDIMKKYLPNDKDREKYNKFFTAYRNNIVHLNIIAKLSELTKNIDKDINSYFDIYHYCTQRVMFNYCKEKNDVVLAKMKDLAHIKSDCNEFSSKHTYPFSSAVLRFMNLPFAYNVPRFKNLSYKKFFDKQWLKHYENLNDFIRILY

SEQ ID NO: 222 - protein, 939 aa, Unknown
  human gut metagenome sequence
MAKKKRITAKERKQNHRELLMKKADSNAEKEKAKKPVVENKPDTAISKDNTPKPNKEIKKSKAKLAGVKWVIKANDDVAYISSFGKGNNSVLEKRIMGDVSSNVNKDSHMYVNPKYTKKNYEIKNGFSSGSSLVTYPNKPDKNSGMDALCLKPYFEKDFFGHIFTDNMHIQAIYNIFDIEKILAKHITNIIYTVNSFDRNYNQSGNDTIGFGLNYRVPYSEYGGGKDSNGEPKNQSKWEKRDNFIKFYNESKPHLGYYENIFYDHGEPISEEKFYNYLNILNFIRNNTFHYKDDDIELYSENYSEEFVFINCLNKFVKNKFKNVNKNFISNEKNNLYIILNAYGKDTENVEVVKKYSKELYKLSVLKTNKNLGVNVKKLRESAIEYGYCPLPYDKEKEVAKLSSVKHKLYKTYDFVITHYLNSNDKLLLEIVETLRLSKNDDEKENVYKKYAEKLFKADDVINPIKAISKLFARKGNKLFKEKIIIKKEYIEDVSIDKNIYDFTKVIFFMTCFLDGKEINDLLTNIISKLQVIEDHNNVIKFISNNKDAVYKDYSDKYAIFRNAGKIATELEAIKSIARMENKIENAPQEPLLKDALLSLGVSDDTKVLENTYNKYFDSKEKTDKQSQKVSTFLMNNVINNNRFKYVIKYINPADINGLAKNRYLVKFVLSKIPEEQIDSYYKLFSNEEEPGCEEKIKLLTKKISKLNFQTLFENNKIPNVEKEKKKAIITLYFTIVYILVKNLVNINGLYTLALYFVERDGYFYKDICGKKDKKKSYNDVDYLLLPEIFSGSKYREETKNLKLPKEKDRDIMKKYLPNDKDREKYNKFFTAYRNNIVHLNIIAKLSELTKNIDKDINSYFDIYHYCTQRVMFNYCKEKNDVVLAKMKDLAHIKSDCNEFSSKHTYPFSSAVLRFMNLPFAYNVPRFKNLSYKKFFDKQ

SEQ ID NO: 223 - protein, 924 aa, Unknown
  human gut metagenome sequence
MAKKNKMKPRELREAQKKARQLKAAEINNNAAPAIAAMPAAEVIAPAAEKKKSSVKAAGMKSILVSENKMYITSFGKGNSAVLEYEVDNNDYNKTQLSSKDNSNIELGDVNEVNITFSSKHGFGSGMKINTSNPTHRSGESSPVRWDMLGLKSELEKRFFGKTFDDNIHIQLIYNILDIEKILAVYVTNIVYALNNMLGEGDESNYDFMGYLSTFNTYKVFTNPNGSTLSDDKKENIRKSLSKFNALLKTKRLGYFGLEEPKTKDTRVLEAYKKRVYHMLAIVGQIRQCVFHDLSEHSEYDLYSFIDNSKKVYRECRETLDYLVDERFDSINKGFIQGNKVNISLLIDMMKGYEADDIIRLYYDFIVLKSQKNLGFSIKKLREKILDEYGFRFKDKQYDSVRSKMYKLMDFLLFCNYYRNDIAAGESLVRKLRFSMTDDEKEGIYADEAAKLWGKFRNDFENIADHMNGDVIKELGKADMDFDEKILDSEKKNASDLLYFSKMIYMLTYFLDGKEINDLLTTLISKFDNIKEFLKIMKSSAVDVECELTAGYKLFNDSQRITNELFIVKNIASMRKPAASAKLTMFRDALTILGIDDKITDDRISEILKLKEKGKGIHGLRNFITNNVIESSRFVYLIKYANAQKIREVAKNEKVVMFVLGGIPDTQIERYYKSCVEFPDMNSSLEAKRSELARMIKNIRFDDFKNVKQQAKGRENVAKERAKAVIGLYLTVMYLLVKNLVNVNARYVIAIHCLERDFGLYKEIIPELASKNLKNDYRILSQTLCELCDNGDESPNLFLKKNKRLRKCVEVDINNADSNMTRKYRNCIAHLTVVRELKEYIGDIRTVDSYFSIYHYVMQRCITKREDDTKQEEIIKYEDDLLKNHGYTKDFVKALNSPFGYNIPRFKNLSIEQLFDRNEYLTEK

SEQ ID NO: 224 - protein, 943 aa, Unknown
  human gut metagenome sequence
MAKKKRITAKERKQNHRESLMKKADSNAEKEKAKKPVVENKPDTAISKDNIPKPNKEIKKSKAKLAGVKWVIKANDDVAYISSFGKGNNSVLEKRIMGDVSSNVNKDSHMYVNPKYTKKNYEIKNGFSSGSSLVTYPNKPDKNSGMDALCLKPYFEKDFFGHIFTDNMHIQAIYNIFDIEKILAKHITNIIYTVNSFDRNYNQSGNDTIGFDINYRVPYSEYGGGKDSNGEPKNKSKWEKRKNFIKFYNKSKPHLGYYENIFYDHGEPISEEKFYNYLNILNFIRNNTFHYKNDDIELYSENYSEEFVFINCLNKFVKNKFKNVNKNFISNEKNNLYIILNAYGKDTENVEVVKKYSKELYKLSVLKTNKNLGVNVKKLRESAIEYGYCPLPYDKEKEVAKLSSIKHKLYKTYDFVITHYLNSNDKLLLEIVEALRLSKNDDEKENVYKKYAEKLFKADDVINPIKAISKLFAEKGNKLFKEMVIIKKEYVEDISIDKNIYDFTKVIFFMTCFLDGKEINDLLTNIISKLQVIEDHNNVIKFISNNKDAVYKDYSDKYAIFRNAGKIATELEAIKSIVRMENKIENAPQEPLLKDALLSLGVSDDTKVLENTYKKYFDSKEKADKQSQKVSTFLMNNVINNNRFKYVIKYINPADINGLAKNRYLVKFVLSNIPEEQIDSYYKLFSNEEEPSCEEKIKLLTKKISKLNFQTLFENNKIPNVEKERKKAIITLYFTIVYILVKNLVNINGLYTLALYFVERDGYFYKDICGKKDKKKSYNGVDYLLLPEIFSGSKYREQTKNLKLPKEKDRDIMKKYLPNDKDREGYNKFFRAYRNNIVHLNIIAKLSELTSNIDKDINSYFDIYHYCTQRVMFNYCKENNNIVLAKMKDLAHIKSDCDEFSSKHTYPFSSAVLRFMNLPFAYNVPRFKNLSYKKFFDKQWLNH

SEQ ID NO: 225 - protein, 939 aa, Unknown
  human gut metagenome sequence
MAKKKRITAKERKQNHRESLMKKADSNAEKEKAKKPVVENKPDTAISKDNIPKPNKEIKKSKAKLAGVKWVIKANDDVAYISSFGKGNNSVLEKRIMGDVSSNVNKDSHMYVNPKYTKKNYEIKNGFSSGSSLVTYPNKPDKNSGMDALCLKPYFEKDFFGHIFTDNMHIQAIYNIFDIEKILAKHITNIIYTVNSFDRNYNQSGNDTIGFDINYRVPYSEYGGGKDSNGEPKNKSKWEKRKNFIKFYNKSKPHLGYYENIFYDHGEPISEEKFYNYLNILNFIRNNTFHYKNDDIELYSENYSEEFVFINCLNKFVKNKFKNVNKNFISNEKNNLYIILNAYGKDTENVEVVKKYSKELYKLSVLKTNKNLGVNVKKLRESAIEYGYCPLPYDKEKEVAKLSSIKHKLYKTYDFVITHYLNSNDKLLLEIVEALRLSKNDDEKENVYKKYAEKLFKADDVINPIKAISKLFAEKGNKLFKEMVIIKKEYVEDISIDKNIYDFTKVIFFMTCFLDGKEINDLLTNIISKLQVIEDHNNVIKFISNNKDAVYKDYSDKYAIFRNAGKIATELEAIKSIVRMENKIENAPQEPLLKDALLSLGVSDDTKVLENTYKKYFDSKEKADKQSQKVSTFLMNNVINNNRFKYVIKYINPADINGLAKNRYLVKFVLSNIPEEQIDSYYKLFSNEEEPSCEEKIKLLTKKISKLNFQTLFENNKIPNVEKERKKAIITLYFTIVYILVKNLVNINGLYTLALYFVERDGYFYKDICGKKDKKKSYNGVDYLLLPEIFSGSKYREQTKNLKLPKEKDRDIMKKYLPNDKDREGYNKFFRAYRNNIVHLNIIAKLSELTSNIDKDINSYFDIYHYCTQRVMFNYCKENNNIVLAKMKDLAHIKSDCDEFSSKHTYPFSSAVLRFMNLPFAYNVPRFKNLSYKKFFDKQ

SEQ ID NO: 226 - protein, 925 aa, Unknown
  human gut metagenome sequence
MAKKNKMKPRELREAQKKARQLKAAEINNNAAPAIAAMPAAQVIAPAAEKKKSSVKAAGMKSILVSENKMYITSFGKGNSAVLEYEVDKVDNNNYNKTQLSSKDNSNIELGDVNEVNITFSSKHGFESGVEINTSNPTHRSGESSPVRWDMLGLKSELEKRFFGKTFDDNIHIQLIYNILDIEKILAVYVTNIVYALNNMLGIKGSESYDDFMGYLSARNTYEVFTHPDKSNLSDKVKGNIKKSLSKFNDLLKTKRLGYFGLEEPKTKDTRVSQAYKKRVYHMLAIVGQIRQSVFHDKSSKLDEDLYSFIDIIDSEYRETLDYLVDERFDSINKGFIQGNKVNISLLIDMMKGYEADDIIRLYYDFIVLKSQKNLGFSIKKLREKMLDEYGFRFKDKQYDSVRSKMYKLMDFLLFCNYYRNDVVAGEALVRKLRFSMTDDEKEGIYADEASKLWGKFRNDFENIADHMNGDVIKELGKADMDFDEKILDSEKKNASDLLYFSKMIYMLTYFLDGKEINDLLTTLISKFDNIKEFLKIMKSSAVDVECELTAGYKLFNDSQRITNELFIVKNIASMRKPASSAKLTMFRDALTILGIDDNITDDRISEILKLKEKGKGIHGLRNFITNNVIESSRFVYLIKYANAQKIREVAKNEKVVMFVLGGIPDTQIERYYKSCVEFPDMNSSLEAKRSELARMIKNIRFDDFKNVKQQAKGRENVAKERAKAVIGLYLTVMYLLVKNLVNVNARYVIAIHCLERDFGLYKEIIPELASKNLKNDYRILSQTLCELCDDRDESPNLFLKKNKRLRKCVEVDINNADSSMTRKYRNCIAHLTVVRELKEYIGDIRTVDSYFSIYHYVMQRCITKREDDTKQEEKIKYEDDLLKNHGYTKDFVKALNSPFGYNIPRFKNLSIEQLFDRNEYLTEK

SEQ ID NO: 227 - protein, 919 aa, Unknown
  human gut metagenome sequence
MAKKNKMKPRELREAQKKARQFKAAEINNNAVPAIAAMPAAEAAAPAAEKKKSSVKAAGMKSILVSENKMYITSFGKGNSAVLEYEVDNNDYNKTQLSSEDSSNIELCGVNEVNITFSSKHGFESGVEINTSNPTHRSGESSPVRGDMLGLKSELEKRFFGKTFDDNIHIQLIYNILDIEKILAVYVTNIVYALNNMLGVKGSESHDDFIGYLSTNNIYDVFIDPDNSSLSDDKKANVRKSLSKFNALLKTKRLGYFGLEEPKTKDTRASEAYKKRVYHMLAIVGQIRQCVFHDKSGAKRFDLYSFINNIDPEYRDTLDYLVDERFDSINKGFIQGNKVNISLLIDMMKGYEADDIIRLYYDFIVLKSQKNLGFSIKKLREKMLEEYGYRFKDKQYDSVRSKMYKLMDFLLFCNYYRNDVVAGEALVRKLRFSMTDDEKEGIYADEAAKLWGKFRNDFENIADHMNGDVIKELGKADMDFDEKILDSEKKNASDLLYFSKMIYMLTYFLDGKEINDLLTTLISKFDNIKEFLKIMKSSAVDVECELTAGYKLFNDSQRITNELFIVKNIASMRKPAASAKLTMFRDALTILGIDDKITDDRISEILKLKEKGKGIHGLRNFITNNVIESSRFVYLIKYANAQKIREVAKNEKVVMFVLGGIPDTQIERYYKSCVEFPDMNSSLGVKRSELARMIKNISFDDFKNVKQQAKGRENVAKERAKAVIGLYLTVMYLLVKNLVNVNARYVIAIHCLERDFGLYKEIIPELASKNLKNDYRILSQTLCELCDKSPNLFLKKNERLRKCVEVDINNADSSMTRKYRNCIAHLTVVRELKEYIGDIRTVDSYFSIYHYVMQRCITKREDDIKQEEKIKYEDDLLKNHGYTKDFVKALNSPFGYNIPRFKNLSIEQLFDRNEYLTEK

SEQ ID NO: 228 - protein, 803 aa, Unknown
  human gut metagenome sequence
MLCLKPTLEKKFFGKEFNDNIHIQLIYNILDIEKILAVYSTNAIYALNNMSADENIENSDFFMKRTTDETFDDFEKKKESTNSREKADFDAFEKFIGNYRLAYFADAFYVDKNKSKSKPKDKAKGIQRGEKEIYSILALIAKLRHWCVHSEEGRAEFWLYKLDELKSDFKNVLDVVYNRPVEKINNRFIENNKVNIQILGSVYKNTDIAELVRSYYEFLITKKYKNMGFSIKKLRESMLEGKGYADKEYDSVRNKLYQMTDFILYTGYINEDSDRADDLVNTLRSSLKEDDKTTVYCKEADYLWKKYRESIREVAASLDVKNINELKNNAFTIPDNELRKCFISYADSVSEFTKLIYLLTRFLSGKEINDLVTTLINKFDNIRSFLEVMDELGLERTFTDEYSFFEGSTKYLAELVELNSFVKSCSFDINAKRTMYRDALDILGIESGKTEEDIEKMIDNIVQFDANGKKLPNKNHGLRNFIASNVIDSNRFEYLVRYGNPKKIRETAKCKPAVRFVLNEIPDAQIERYYKACYPDEKSLCFANMQRDKLAGVIANIKFDDFSDAGSYQKANATSTKITSEAEIKRKNQAIIRLYLTVMYIMLKNLVNVNARYVIAFHCVERDTKLYAESGLEVGNIEKNKTNLTMAVMGVKLENGIIKTEFDKSLAENAANRYFRNARWYKLILDNLKKSERAVVNEFRNTVCHLNAIRNININIKEIKEVENYFALYHYLIQKHLEKRFADNGGSTGDFISKLEEHKTYCKDFVKAYCTPFGYNLVRYKNLTIDGLFDKNYPGKDDSDKQK

SEQ ID NO: 229 - protein, 919 aa, Unknown
  human gut metagenome sequence
MAKKNKMKPRELREAQKKARQLKAAEINNNAVPAIAAMPAAEAAAPAAEKKKSSVKAAGMKSILVSENKMYITSFGKGNSAVLEYEVDNNDYNKTQLSSKDNSNIELCDVNEVNITFSSKHGFESGVEINTSNPTHRSGESSPVRWDMLGLKSELEKRFFGKTFDDNIHIQLIYNILDIEKILAVYITNIVYALNNMLGVKGSESHDDFIGYLSTNNIYDVFIDPDNSSLSDDKKANVRKSLSKFNALLKTKRLGYFGLEEPKTKDNRVSEAYKKRVYHMLAIVGQIRQSVFHDKSSKLHEDLYSFIDIIDSEYRETLDYLVDERFDSINKGFIQGNKVNISLLIDMMKGYEADDIIRLYYDFIVIKSQKNLGFSIKKLREKMLDEYGFRFKDKQYDSVRSKMYKLMDFLLFCNYYRNDVVAGEALVRKLRFSMTDDEKEGIYADEAEKLWGKFRNDFENIADHMNGDVIKELGKADMDFDEKILDSEKKNASDLLYFSKMIYMLTYFLDGKEINDLLTTLISKFDNIKEFLKIMKSSAVNVECELTAGYKLFNDSQRITNELFIVKNIASMRKPAASAKLTMFRDALTILGIDDKITDDRISEILKLKEKGKGIHGLRNFITNNVIESSRFVYLIKYANAQKIREVAKNEKVVMFVLGGIPDTQIERYYKSCVEFPDMNSPLEAKRSELARMIKNIRFDDFKNVKQQAKGRENVAKERAKAVIGLYLTVMYLLVKNLVNVNARYVIAIHCLERDFGLYKEIIPELASKNLKNDYRILSQTLCELCDKSPNLFLKKNERLRKCVEVDINNADSSMTRKYRNCIAHLTVVRELKEYIGDIRTVDSYFSIYHYVMQRCITKREDDIKQEEKIKYEDDLLKNHGYTKDFVKALNSPFGYNIPRFKNLSIEQLFDRNEYLTEK

SEQ ID NO: 230 - protein, 808 aa, Unknown
  human gut metagenome sequence
MAKKNKMKPRELREAQKKARQFKAAEINNNAVPAIAAMPAAEAAAPAAEKKKSSVKAAGMKSILVSENKMYITSFGKGNSAVLEYEVDNNDYNKTQLSSEDSSNIELCGVNEVNITFSSKHGFESGVEINTSNPTHRSGESSPVRGDMLGLKSELEKRFFGKTFDDNIHIQLIYNILDIEKILAVYVTNIVYALNNMLGVKGSESHDDFIGYLSTNNIYDVFIDPDNSSLSDDKKANVRKSLSKFNALLKTKRLGYFGLEEPKTKDTRASEAYKKRVYHMLAIVGQIRQCVFHDKSGAKRFDLYSFINNIDPEYRDTLDYLVDERFDSINKGFIQGNKVNISLLIDMMKGYEADDIIRLYYDFIVLKSQKNLGFSIKKLREKMLEEYGYRFKDKQYDSVRSKMYKLMDFLLFCNYYRNDVVAGEALVRKLRFSMTDDEKEGIYADEAAKLWGKFRNDFENIADHMNGDVIKELGKADMDFDEKILDSEKKNASDLLYFSKMIYMLTYFLDGKEINDLLTTLISKFDNIKEFLKIMKSSAVDVECELTAGYKLFNDSQRITNELFIVKNIASMRKPAASAKLTMFRDALTILGIDDKITDDRISEILKLKEKGKGIHGLRNFITNNVIESSRFVYLIKYANAQKIREVAKNEKVVMFVLGGIPDTQIERYYKSCVEFPDMNSSLGVKRSELARMIKNISFDDFKNVKQQAKGRENVAKERAKAVIGLYLTVMYLLVKNLVNVNARYVIAIHCLERDFGLYKEIIPELASKNLKNDYRILSQTLCELCDKSPNLFCASALKSILIMQTAA

SEQ ID NO: 231 - protein, 922 aa, Unknown
  human gut metagenome sequence
MAKKNKMKPRELREAQKKARQLKAAEINNNAAPAIAAMPAAEAAAPAAEKKKSSVKAAGMKSILVSENKMYITSFGKGNSAVLEYEVDNNDYNQTQLSSKGSSNIELHGVNEVNITFSSKHGFESGVEINTSNPTHRSGESSPVRWDMLGLKSELEKRFFGKTFDDNIHIQLIYNILDIEKILAVYVTNIVYALNNMLGVKGSESHDDFIGYLSTNNTYDVFIDPDNSSLSDDKKANVRKSLSKFNVLLKTKRLGYFGLEEPKTKDTRVSQAYKKRVYHMLAIVGQIRQCVFHDKSGAKRFDLYSFINNIDPEYRETLDYLVDERFDSINKGFIEGNKINISLLIDMMKGYEADDIIRLYYDFIVLKSQKNLGFSIKKLREKMLDEYGFRFKDKQYDPVRSKMYKLMDFLLFCNHYRNDVAAGEALVRKLRFSMTDDEKEGIYADEAAKLWGKFRNDFENIADHMNGDVIKELGKADMDFDEKILDSEKKNASDLLYFSKMIYMLTYFLDGKEINDLLTTLISKFDNIKEFLKIMKSSAVDVECELTAGYKLFNDSQRITNELFIVKNIASMRKPAASAKLTMFRDALTILGIDDNITDDRISEILKLKEKGKGIHGLRNFITNNVIESSRFVYLIKYANAQKIREVAKNEKVVMFVLGGIPDTQIERYYKSCVEFPDMNSSLEAKRSELARMIKNISFDDFKNVKQQAKGRENVAKERAKAVIGLYLTVMYLLVKNLVNVNARYVIAIHCLERDFGLYKEIIPELASKNLKNDYRILSQTLCELCDDRDESPNLFLKKNKRLRKCVEVDINNADSSMTRKYRNCIAHLTVVRELKEYIGDIRTVDSYFSIYHYVMQRCITKRENDTKQEEKIKYEDDLLKNHGYTKDFVKALNSPFGYNIPRFKNLSIEQLFDRNEYLTEK

SEQ ID NO: 232 - protein, 924 aa, Unknown
  human gut metagenome sequence
MAKKNKMKPRELREAQKKARQFKAAEINNNAAPAIAAMPAAEVIAPVAEKKKSSVKAAGMKSILVSENKMYITSFGKGNSAVLEYEVDNNDYNKTQLSSKDNSNIELCGVNEVNITFSSKHGFESGVEINTSNPTHRSGESSPVRWDMLGLKSELEKRFFGKTFDDNIHIQLIYNILDIEKILAVYVTNIVYALNNMLGEGDESNYDFMGYLSTFNTYKVFTNPNGSTLSDDKKENIRKSLSKFNALLKTKRLGYFGLEEPKTKDTRVLEAYKKRVYHMLAIVGQIRQCVFHDLSEHSEYDLYSFIDNSKKVYRECRETLDYLVDERFDSINKGFIQGNKVNISLLIDMMKGYEADDIIRLYYDFIVLKSQKNLGFSIKKLREKILDEYGFRFKDKQYDSVRSKMYKLMDFLLFCNYYRNDIAAGESLVRKLRFSMTDDEKEGIYADEAAKLWGKFRNDFENIADHMNGDVIKELGKADMDFDEKILDSEKKNASDLLYFSKMIYMLTYFLDGKEINDLLTTLISKFDNIKEFLKIMKSSAIDVECELTAGYKLFNDSQRITNELFIVKNIASMRKPAASAKLTMFRDALTILGIDDKITDDRISEILKLKEKGKGIHGLRNFITNNVIESSRFVYLIKYANAQKIREVAKNEKVVMFVLGGIPDTQIERYYKSCVEFPDMNSSLEAKRSELARMIKNIRFDDFKNVKQQAKGRENVAKERAKAVIGLYLTVMYLLVKNLVNVNARYVIAIHCLERDFGLYKEIIPELASKNLKNDYRILSQTLCELCDNGDESPNLFLKKNKRLRKCVEVDINNADSSMTRKYRNCIAHLTVVRELKEYIGDIRTVDSYFSIYHYVMQRCITKREDDTKQEEKIKYEDDLLKNHGYTKDFVKALNSPFGYNIPRFKNLSIEQLFDRNEYLTEK

SEQ ID NO: 233 - protein, 919 aa, Unknown
  human gut metagenome sequence
MAKKNKMKPRELREAQKKARQLKAAEINNNAAPAIAAMPAAQVIAPAAEKKKSSVKAAGMKSILVSENKMYITSFGKGNSAVLEYEVDNNDYNQTQLSSDGSSNIELRGVNEVNITFSSKHGFESGVEINTSNPTHRSGESSPVRGDMLGLKSELEKRFFGKTFDDNIHIQLIYNILDIEKILAVYVTNIVYALNNMLGVKGSESYDDFMGYLSAQNTYYIFTHPDKSNLSDKVKGNIKKSLSKFNDLLKTKRLGYFGLEEPKTKDKRVSEAYKKRVYHMLAIVGQIRQSVFHDKSNELDEYLYSFIDIIDSEYRDTLDYLVDERFDSINKGFVQGNKVNISLLIDMMKGYEADDIIRLYYDFIVLKSQKNLGFSIKKLREKMLDEYGFRFKDKQYDSVRSKMYKLMDFLLFCNYYRNDVVAGEALVRKLRFSMTDDEKEGIYADEAEKLWGKFRNDFENIADHMNGDVIKELGKADMDFDEKILDSEKKNASDLLYFSKMIYMLTYFLDGKEINDLLTTLISKFDNIKEFLKIMKSSAVDVECELTAGYKLFNDSQRITNELFIVKNIASMRKPAASAKLTMFRDALTILGIDDKITDDRISEILKLKEKGKGIHGLRNFITNNVIESSRFVYLIKYANAQKIREVAENEKVVMFVLGGIPDTQIERYYKSCVEFPDMNSPLEAKRSELARMIKNIRFDDFKNVKQQAKGRENVAKERAKAVIGLYLTVMYLLVKNLVNVNARYVIAIHCLERDFGLYKEIIPELASKNLKNDYRILSQTLCELCDKSPNLFLKKNERLRKCVEVDINNADSSMTRKYRNCIAHLTVVRELKEYIGDIRTVDSYFSIYHYVMQRCITKREDDTKQEEKIKYEDDLLKNHGYTKDFVKALNSPFGYNIPRFKNLSIEQLFDRNEYLTEK

SEQ ID NO: 234 - protein, 922 aa, Unknown
  human gut metagenome sequence
MAKKNKMKPRELREAQKKARQLKAAEINNNAAPAIAAMPAAQVIAPAAEKKKSSVKAAGMKSILVSENKMYITSFGKGNSAVLEYEVDKVDNNNYNKTQLSSKDNSNIELGDVNEVNITFSSKHGFESGVEINTSNPTHRSGESSPVRWDMLGLKSELEKRFFGKTFDDNIHIQLIYNILDIEKILAVYVTNIVYALNNMLGVKGSESHDDFIGYLSTNNTYDVFIDPDNSSLSDDKKANVRKSLSKFNVLLKTKRLGYFGLEEPKTKDNRVSEAYKKRVYHMLAIVGQIRQCVFHDKSGAKRFDLYSFINNIDPEYRDTLDYLVEERLKSINKDFIQGNKVNISLLIDMMKGYEADDIIRLYYDFIVLKSQKNLGFSIKKLREKMLEEYGFRFKDKQYDSVRSKMYKLMDFLLFCNYYRNDIAAGEALVRKLRFSMTDDEKEGLYADEAAKLWGKFRNDFENIADHMNGDVIKELGKADMDFDEKILDSEKKNASDLLYFSKMIYMLTYFLDGKEINDLLTTLISKFDNIKEFLKIMKSSAVNVECELTAGYKLFNDSQRITNELFIVKNIASMRKPAASAKLTMFRDALTILGIDDKITDDRISEILKLKEKGKGIHGLRNFITNNVIESSRFVYLIKYANAQKIRKVAENEKVVMFVLGGIPDTQIERYYKSCVEFPDMNSSLEVKRSELARMIKNISFDDFKNVKQQAKGRENVAKERAKAVIGLYLTVMYLLVKNLVNVNARYVIAIHCLERDFGLYKEIIPELASKNLKNDYRILSQTLCELCDKSPNLFLKKNERLRKCVEVDINNADSSMTRKYRNCIAHLTVVRELKEYIGDIRTVDSYFSIYHYVMQRCITKREDDKKQEEKIKFEDDLLKNHGYTKDFVKALNSPFGYNIPRFKNLSIEQLFDRNEYLTEK

SEQ ID NO: 235 - protein, 921 aa, Unknown
  human gut metagenome sequence
MAKKNKMKPRELREAQKKARQLKAAEINNNAVPAIAAMPAAEAAAPAAEKKKSSVKAAGMKSILVSENKMYITSFGKGNSAVLEYEVDNNDYNKTQLSSKDNSNIELCDVGKVNITFSSRRGFESGVEINTSNPTHRSGESSSVRGDMLGLKSELEKRFFGKNFDDNIHIQLIYNILDIEKILAVYVTNIVYALNNMLGEGDESNYDFMGYLSTFNTYKVFTNPNGSTLSDDKKENIRKSLSKFNALLKTKRLGYFGLEEPKTKDTRASEAYKKRVYHMLAIVGQIRQCVFHDKSGAKRFDLYSFINNIDPEYRETLDYLVDERFDSINKGFIQGNKVNISLLIDMMKGYEADDIIRLYYDFIVLKSQKNLGFSIKKLREKMLDEYGFRFKDKQYDSVRSKMYKLMDFLLFCNYYRNDIAAGESLVRKLRFSMTDDEKEGIYADEAAKLWGKFRNDFENIADHMNGDVIKELGKADMDFDEKILDSEKKNASDLLYFSKMIYMLTYFLDGKEINDLLTTLISKFDNIKEFLKIMKSSAVDVECELTAGYKLFNDSQRITNELFIVKNIASMRKPAASAKLTMFRDALTILGIDDKITDDRISEILKLKEKGKGIHGLRNFVTNNVIESSRFVYLIKYANAQKIREVAKNEKVVMFVLGGIPDTQIERYYKSCVEFPDMNSSLEAKRSELARMIKNIRFDDFKNVKQQAKGRENVAKERAKAVIGLYLTVMYLLVKNLVNVNARYVIAIHCLERDFGLYKEIIPELASKNLKNDYRILSQTLCELCDNPDESPNLFLKKNRRLRKCVEVDINNADSSMTRKYRNCIAHLTVVRELKEYIGDICTVDSYFSIYHYVMQRCITKRENDTKQEEKIKYEDDLLKNHGYTKDFVKALNSPFGYNIPRFKNLSIEQLFDRNEYLTEK

SEQ ID NO: 236 - protein, 922 aa, Unknown
  human gut metagenome sequence
MAKKNKMKPRELREAQKKARQLKAAEINNNAVPAIAAMPAAEVIAPAAEKKKSSVKAAGMKSILVSENKMYITSFGKGNSAVLEYEVDNNDYNKTQLSSKDNSNIELGNVNEVNITFSSRRGFESGVEINTSNPTHRSGESSPVRGDMLGLKSELEKRFFGKTFDDNIHIQLIYNILDIEKILAVYVTNIVYALNNMLGEDDDESHDDFMGYLSAKNTYDVFTDPDESDLSKNIKGNIKKSLSKFNDLLKTKRLGYFGLEEPKTKDTNALEAYKKRVYHMLAIVGQIRQSVFHDKSSKLDEDLYSFIDIIDSEYRETLDYLVDERFDSINKGFIQGNKVNISLLIDMMKGYEADDIIRLYYDFIVLKSQKNLGFSIKKLREKMLEEYGFRFKDKQYDSVRSKMYKLMDFLLFCNYYRNDVAAGEALVRKLRFSMTDDEKEGIYADEAEKLWGKFRNDFENIADHMNGDVIKELGKADMDFDEKILDSEKKNASDLLYFSKMIYMLTYFLDGKEINDLLTTLISKFDNIKEFLKIMKSSAVDVECELTAGYKLFNDSQRITNELFIVKNIASMRKPAASAKLTMFRDALTILGIDDKITDDRISEILKLKEKGKGIHGLRNFITNNVIESSRFVYLIKYANAQKIRKVAENEKVVMFVLGGIPDTQIERYYKSCVEFPDMNSSLEAKYSELARMIKNISFDDFKNVKQQAKGRENVAKERAKAVIGLYLTVMYLLVKNLVNVNARYVIAIHCLERDFGLYKEIIPELASKNLKNDYRILSQTLCELCDDRDESPNLFLKKNRRLRKCVEVDINNADSSMTRKYRNCIAHLTVVRELKEYIGDIRTVDSYFSIYHYVMQRCITKREDDTKQEDKIKYEDDLLKNHGYTKDFVKALNSPFGYNIPRFKNLSIEQLFDRNEYLTEK

SEQ ID NO: 237 - protein, 920 aa, Unknown
  human gut metagenome sequence
MAKKNKMKPRELREAQKKARQLKAVEINNNAVPEIAAMPAAEVIAPVAEKKKSSVKAAGMKSILVSENKMYITSFGKGNSAVLEYEVDNNDYNKTQLSSKNSSNIELRGVNEVNITFSSKHGFESGVEINTSNPTHRSGESSPVRWDMLGLKSELEKRFFGKTFDDNIHIQLIYNILDIEKILAVYVTNIVYALNNMLGIKGSESYDDFMGYLSARNTYEVFTHPDKSSLSDDKKANVRKSLSKFNVLLKTKRLGYFGLEEPKTKDTRVSQAYKKRVYHMLAIVGQIRQSVFHDKSSKLHEDLYSFIDIIDSEYRETLDYLVDERFDSINKGFIQGNKVNISLLIDMMKDDYEADDIIRLYYDFIVLKSQKNLGFSIKKLREKMLDEYGFRFKDKQYDSVRSKMYKLMDFLLFCNYYRNDVIAGEALVRKLRFSMTDDEKEGIYADEAAKLWGKFRNDFENIADHMNGDVIKELGKADMDFDEKILDSEKKNASDLLYFSKMIYMLTYFLDGKEINDLLTTLISKFDNIKEFLKIMKSSAVDVECELTAGYKLFNDSQRITNELFIVKNIASMRKPAASAKLTMFRDALTILGIDDKITDDRISEILKLKEKGKGIHGLRNFITNNVIESSRFVYLIKYANAQKIREVAENEKVVMFVLGGIPDTQIERYYKSCVEFPDMNSPLEAKRSELARMIKNIRFDDFKNVKQQAKGRENVAKERAKAVIGLYLTVMYLLVKNLVNVNARYVIAIHCLERDFGLYKEIIPELASKNLKNDYRILSQTLCELCDKSPNLFLKKNERLRKCVEVDINNADSSMTRKYRNCIAHLTVVRELKEYIGDIRTVDSYFSIYHYVMQRCITKREDDIKQEEKIKYEDDLLKNHGYTKDFVKALNSPFGYNIPRFKNLSIEQLFDRNEYLTEK

SEQ ID NO: 238 - protein, 921 aa, Unknown
  human gut metagenome sequence
MAKKNKMKPRELREAQKKARQLKAAEINNNAVPAIAAMPAAEAAAPAAEKKKSSVKAAGMKSILVSENKMYITSFGKGNSAVLEYEVDNNDYNKTQLSSKDNSNIELCDVDEVNITFSSKHGFESGVKINTSNPTHRSGESSSVRGDMLGLKSELEKRFFGKTFDDNIHIQLIYNILDIEKILAVYVTNIVYALNNMLGLENESNNDFMGYLSAKNTYDVFTDPDESDLSKNIKGNIKKSLSKFNDLLKTKRLGYFGLEEPKTKDKRVSEAYKKRVYHMLAIVGQIRQSVFHDKSNELDEYLYSFIDIIDSEYRETLDYLIDERFDSINKGFIQGNKVNISLLIDMMKGYEADDIIRLYYDFIVLKSQKNLGFSIKKLREKMLDEYGFRFKDKQYDSVRSKMYKLMDFLLFCNYHRKDVVAGEALVRKLRFSMTDEEKEGIYADEAAKLWGKFRNDFENIADHMNGDVIKELGKADMDFDEKILDSEKKNASDLLYFSKMIYMLTYFLDGKEINDLLTTLISKFDNIKEFLKIMKSSAVNVECELTTGYKLFNDSQRITNELFIVKNIASMRKPAASAKLTMFRDALTILGIEDNITDDRISEILKLKEKGKGIHGLRNFITNNVIESSRFVYLIKYANAQKIREVAENEKVVMFVLGGIPDTQIERYYKSCVEFPDMNSSMGAKRRELAKMIKSISFENFKDVKQQAKGRENVAKERAKAVIGLYLTVMYLLVKNLVNVNARYVIAIHCLERDFGLYKEIIPELASKNLKNDYRILSQTLCELCDNGDESPNLFLKKNKRLRKCVEVDINNADSNMTRKYRNCIAHLTVVRELKEYIGDIYAVDSYFSIYHYVMQRCITKRENDTEQAEKIKYEDDLFKNHGYTRDFVKALNSPFGYNIPRFKNLSIKQMFDRNEYLTEK

SEQ ID NO: 239 - protein, 922 aa, Unknown
  human gut metagenome sequence
MAKKNKMKPRELREAQKKARQFKAAEINNNAVPAIAAMPAAEAAAPAAEKKKSSVKAAGMKSILVSENKMYITSFGKGNSAVLEYEVDNNDYNKTQLSSEDSSNIELCGVNEVNITFSSKHGFESGVEINTSNPTHRSGESSPVRGDMLGLKSELEKRFFGKTFDDNIHIQLIYNILDIEKILAVYVTNIVYALNNMLGVKGSESHDDFIGYLSTNNIYDVFIDPDNSSLSDDKKANVRKSLSKFNALLKTKRLGYFGLEEPKTKDTRASEAYKKRVYHMLAIVGQIRQCVFHDKSGAKRFDLYSFINNIDPEYRDTLDYLVDERFDSINKGFIQGNKVNISLLIDMMKGYEADDIIRLYYDFIVLKSQKNLGFSIKKLREKMLEEYGYRFKDKQYDSVRSKMYKLMDFLLFCNYYRNDVVAGEALVRKLRFSMTDDEKEGIYADEAAKLWGKFRNDFENIADHMNGDVIKELGKADMDFDEKILDSEKKNASDLLYFSKMIYMLTYFLDGKEINDLLTTLISKFDNIKEFLKIMKSSAVNVECELTAGYKLFNDSQRITNELFIVKNIASMRKPAASAKLTMFRDALTILGIDDKITDDRISEILKLKEKGKGIHGLRNFITNNVIESSRFVYLIKYANAQKIREVAKNEKVVMFVLGGIPDTQIERYYKSCVEFPDMNSSLEVKRSELARMIKNIRFDDFKNVKQQAKGRENVAKERAKAVIGLYLTVMYLLVKNLVNVNARYVIAIHCLERDFGLYKEIIPELASKNLKNDYRILSQTLCELCDDRDESPNLFLKKNKRLRKCVEVDINNADSSMTRKYRNCIAHLTVVRELKKYIGDIRTVDSYFSIYHYVMQRCITKREDDTKQEEKIKYEDDLLKNHGYTKDFVKALNSPFGYNIPRFKNLSIEQLFDRNEYLTEK

SEQ ID NO: 240 - protein, 919 aa, Unknown
  human gut metagenome sequence
MAKKNKMKPRELREAQKKARQLKAAEINNNAVPAIAAMPAAEVIAPAAEKKKSSVKAAGMKSILVSENKMYITSFGKGNSAVLEYEVDNNDYNQTQLSSDGSSNIELRGVNEVNITFSSKHGFESGVEINTSNPTHRSGESSPVRWDMLGLKSELEKRFFGKTFDDNIHIQLIYNILDIEKILAVYVTNIVYALNNMLGEGDDESHDDFMGYLSAKNTYDVFTDPDESDLSKNIKGNIKKSLSKFNDLLKTKRLGYFGLEEPKTKDTNALEAYKKRVYHMLAIVGQIRQSVFHDKSSKLDEDLYSFIDIIDSEYRETLDYLVDERFDSINKGFIQGNKVNISLLIDMMKGYEADDIIRLYYDFIVLKSQKNLGFSIKKLREKMLEEYGYRFKDKQYDSVRSKMYKLMDFLLFCNYYRNDVVAGEALVRKLRFSMTDDEKEGIYADEAAKLWGKFRNDFENIADHMNGDVIKELGKADMDFDEKILDSEKKNASDLLYFSKMIYMLTYFLDGKEINDLLTTLISKFDNIKEFLKIMKSSAVDVECELTAGYKLFNDSQRITNELFIVKNIASMRKPAASAKLTMFRDALTILGIDDKITDDRISEILKLKEKGKGIHGLRNFITNNVIESSRFVYLIKYANAQKIREVAENEKVVMFVLGGIPDTQIERYYKSCVEFPDMNSPLEAKRSELARMIKNIRFDDFKNVKQQAKGRENVAKERAKAVIGLYLTVMYLLVKNLVNVNARYVIAIHCLERDFGLYKEIIPELASKNLKNDYRILSQTLCELCDKSPNLFLKKNERLRKCVEVDINNADSSMTRKYRNCIAHLTVVRELKEYIGDIRTVDSYFSIYHYVMQRCITKREDDIKQEEKIKYEDDLLKNHGYTKDFVKALNSPFGYNIPRFKNLSIEQLFDRNEYLTEK

SEQ ID NO: 241 - protein, 954 aa, Unknown
  human gut metagenome sequence
MGKKIHARDLREQRKTDRTEKFADQNKKREAERAVQKKDAAVSVKSVSSVSSKKDNVTKSMAKAAGVKSVFAVENTVYMTSFGRGNDAVLEQKIVDTSHEQLNIDDPAYQLNVVTMNGYSVTGHRGETVSAVTDNPLRRFNGGKKDEPEQSVPTDMLCLKPTLEKKFFGKEFNDNIHIQLIYNILDIEKILAVYSTNAIYALNNMSADENIENSDFFMKRTTDETFDDFEKKKESTNSREKADFDAFEKFIGNYRLAYFADAFYVNKKNPKGKARNVLREDKELYSVLTLIGKLRHWCVHSEEGRAEFWLYKLNELKDDFKNVLDVVYNRPVEEINNRFIENNKVNIQILGSVYKNTDIAELVRSYYEFLITKKYKNMGFSIKKLRESMLEGKGYADKEYDSVRNKLYQMTDFILYTGYINEDSDRADDLVNTLRSSLKEDDKTTVYCKEADYLWKKYRESIREVADALDGDNIKRLSKSNIEIQEDKLRKCFISYADSVSEFTKLIYLLTRFLSGKEINDLVTTLINKFDNIRSFLEIMDELGLDRTFTAEYSFFEDSTKYLAELVELNSFVKSCSFDINAKRTMYRDALDILGIKSGKTEEDIEKMIDNILQIDANGDKKLKKNNGLRNFIASNVIDSNRFKYLVRYGNPKKIRETAKCKPAVRFVLNEIPDAQIERYYEACCPENTALCSANKKREKLADMIAEIEFENFSDAGNYQKANVTSKTHEAEIKRKNQSIIRLYLTVMYIMLKNLVNVNARYVIAFHCVERDTKLYAESGLEVGNIEKNKTNLTMAVMGVKLENGIIKTEFDKSFAENAANRYLRNARWYKLILDNLKKSERAVVNEFRNTVCHLNAIRNININIDGIKEVENYFALYHYLIQKHLENRFADKKVERDTGDFISKLEEHKTYCKDFVKAYCTPFGYNLVRYKNLTIDGLFDKNYPGKDDSDKQK

SEQ ID NO: 242 - protein, 919 aa, Unknown
  human gut metagenome sequence
MAKKNKMKPRELREAQKKARQLKAAEINNNAAPAIAAMPAAEVIAPAAEKKKSSVKAAGMKSILVSKNKMYITSFGKGNSAVLEYEVDNNDYNQTQLSSKNSSNIELHGVNEVNITFSSKHGFESGVEINTSNPTHRSGESSPVRGDMLGLKSELEKRFFGKTFDDNIHIQLIYNILDIEKILAVYVTNIVYALNNMLGEGDDESHDDFMGYLSAKNTYDVFTDPDESDLSKNIKGNIKKSLSKFNDLLKTKRLGYFGLEEPKTKDTNALEAYKKRVYHMLAIVGQIRQSVFHDKSSKLDEDLYSFIDIIDSEYRETLDYLVDERFDSINKGFIQGNKVNISLLIDMMKGYEADDIIRLYYDFIVLKSQKNLGFSIKKLREKMLEEYGYRFKDKQYDSVRSKMYKLMDFLLFCNYYRNDVVAGEALVRKLRFSMTDDEKEGIYADEAAKLWGKFRNDFENIADHMNGDVIKELGKADMDFDEKILDSEKKNASDLLYFSKMIYMLTYFLDGKEINDLLTTLISKFDNIKEFLKIMKSSAVDVECELTAGYKLFNDSQRITNELFIVKNIASMRKPAASAKLTMFRDALTILGIDDKITDDRISEILKLKEKGKGIHGLRNFITNNVIESSRFVYLIKYANAQKIREVAENEKVVMFVLGGIPDTQIERYYKSCVEFPDMNSPLEAKRSELARMIKNIRFDDFKNVKQQAKGRENVAKERAKAVIGLYLTVMYLLVKNLVNVNARYVIAIHCLERDFGLYKEIIPELASKNLKNDYRILSQTLCELCDKSPNLFLKKNERLRKCVEVDINNADSSMTRKYRNCIAHLTVVRELKEYIGDIRTVDSYFSIYHYVMQRCITKREDDIKQEEKIKYEDDLLKNHGYTKDFVKALNSPFGYNIPRFKNLSIEQLFDRNEYLTEK

SEQ ID NO: 243 - protein, 922 aa, Unknown
  human gut metagenome sequence
MAKKNKMKPRELREAQKKARQLKAAEINNNAAPAIAAMPAAEAAAPAAEKKKSSVKAAGMKSILVSENKMYITSFGKGNSAVLEYEVDNNDYNKTQLSSKGSSNIELHGVNEVNITFSSKHGFESGVEINTSNPTHRSGESSPVRGDMLGLKSELEKRFFGKTFDDNIHIQLIYNILDIEKILAVYVTNIVYALNNMLGEGDDESHDDFMGYLSTFNTYKVFTNPNGSTLSDDKKENIRKSLSKFNALLKTKRLGYFGLEEPKTKDTRASEAYKKRVYHMLAIVGQIRQSVFHDKSNELDEYLYSFIDIIDSEYRETLDYLIDERFDSINKGFIQGNKVNISLLIDMMKGYEADDIIRLYYDFIVLKSQKNLGFSIKKLREKMLDEYGFRFKDKQYDSVRSKMYKLMDFLLFCNYYRNDVVAGEALVRKLRFSMTDDEKEGIYADEAEKLWGKFRNDFENIADHMNGDVIKELGKADMDFDEKILDSEKKNASDLLYFSKMIYMLTYFLDGKEINDLLTTLISKFDNIKEFLKIMKSSAVDVECELTAGYKLFNDSQRITNELFIVKNIASMRKPAASAKLTMFRDALTILGIDDKITDDRISEILKLKEKGKGIHGLRNFITNNVIESSRFVYLIKYANAQKIREVAKNEKVVMFVLGGIPDTQIERYYKSCVEFPDMNSSLEVKRSELARMIKNISFDDFKNVKQQAKGRENVAKERAKAVIGLYLTVMYLLVKNLVNVNARYVIAIHCLERDFGLYKEIIPELASKNLKNDYRILSQTLCELCDNRDESPNLFLKKNKRLRKCVEVDINNADSSMTRKYRNCIAHLTVVRELKEYIGDIRTVDSYFSIYHYVMQRCITKREDDKKQEEKIKFEDDLLKNHGYTKDFVKALNSPFGYNIPRFKNLSIEQLFDRNEYLTEK

SEQ ID NO: 244 - protein, 915 aa, Unknown
  human gut metagenome sequence
MAKKNKMKPRELREAQKKARQLKAAEINNNAAPAIAAAPAAEKKKSSVKAAGMKSILVSENKMYITSFGKGNSAVLEYEVDNNDYNQTQLSSKGSSNIELHGVNEVNITFSSKHGFESGVEINTSNPTHRSGESSPVRWDMLGLKSELEKRFFGKTFDDNIHIQLIYNILDIEKILAVYVTNIVYALNNMLGVKGSESHDDFIGYLSTNNTYDVFIDPDNSSLSDDKKANVRKSLSKFNVLLKTKRLGYFGLEEPKTKDTRVSQAYKKRVYHMLAIVGQIRQCVFHDKSGAKRFDLYSFINNIDPEYRETLDYLVDERFDSINKGFIEGNKINISLLIDMMKGYEADDIIRLYYDFIVLKSQKNLGFSIKKLREKMLDEYGFRFKDKQYDPVRSKMYKLMDFLLFCNHYRNDVAAGEALVRKLRFSMTDDEKEGIYADEAAKLWGKFRNDFENIADHMNGDVIKELGKADMDFDEKILDSEKKNASDLLYFSKMIYMLTYFLDGKEINDLLTTLISKFDNIKEFLKIMKSSAVDVECELTAGYKLFNDSQRITNELFIVKNIASMRKPAASAKLTMFRDALTILGIDDNITDDRISEILKLKEKGKGIHGLRNFITNNVIESSRFVYLIKYANAQKIREVAKNEKVVMFVLGGIPDTQIERYYKSCVEFPDMNSSLEAKRSELARMIKNISFDDFKNVKQQAKGRENVAKERAKAVIGLYLTVMYLLVKNLVNVNARYVIAIHCLERDFGLYKEIIPELASKNLKNDYRILSQTLCELCDDRDESPNLFLKKNKRLRKCVEVDINNADSSMTRKYRNCIAHLTVVRELKEYIGDIRTVDSYFSIYHYVMQRCITKRENDTKQEEKIKYEDDLLKNHGYTKDFVKALNSPFGYNIPRFKNLSIEQLFDRNEYLTEK

SEQ ID NO: 245 - protein, 922 aa, Unknown
  human gut metagenome sequence
MAKKNKMKPRELREAQKKARQLKAAEINNNAAPAIAAMPAAQVIAPAAEKKKSSVKAAGMKSILVSENKMYITSFGKGNSAVLEYEVDKVDNNNYNKTQLSSKDNSNIELRDVNEVNITFSSKHGFESGVEINTSNPTHRSGESSPVRWDMLGLKSELEKRFFGKTFDDNIHIQLIYNILDIEKILAVYVTNIVYALNNMLGEGDDESHDDFMGYLSAKNTYDVFTDPDESDLSKNIKGNIKKSLSKFNDLLKTKRLGYFGLEEPKTKDTNALEAYKKRVYHMLAIVGQIRQSVFHDKSSKLDEDLYSFIDIIDSEYRETLDYLVDERFDSINKGFIQGNKVNISLLIDMMKGYEADDIIRLYYDFIVLKSQKNLGFSIKKLREKMLEEYGYRFKDKQYDSVRSKMYKLMDFLLFCNYYRNDVAAGEALVRKLRFSMTDDEKEGIYADEAEKLWGKFRNDFENIADHMNGDVIKELGKADMDFDEKILDSEKKNASDLLYFSKMIYMLTYFLDGKEINDLLTTLISKFDNIKEFLKIMKSSAVDVECELTAGYKLFNDSQRITNELFIVKNIASMRKPAASAKLTMFRDALTILGIDDKITDDRISEILKLKEKGKGIHGLRNFITNNVIESSRFVYLIKYANAQKIRKVAKNEKVVMFVLGGIPDTQIERYYKSCVEFPDMNSSLEVKRSELARMIKNISFDDFKNVKQQAKGRENVAKERAKAVIGLYLTVMYLLVKNLVNVNARYVIAIHCLERDFGLYKEIIPELASKNLKNDYRILSQTLCELCDKSPNLFLKKNRRLRKCVEVDINNADSSMTRKYRNCIAHLTVVRELKEYIGDIRTVDSYFSIYHYVMQRCITKRENDTKQEEKIKYEDDLLKNHGYTKDFVKALNSPFGYNIPRFKNLSIEQLFDRNEYLTEK

SEQ ID NO: 246 - protein, 926 aa, Unknown
  human gut metagenome sequence
MAKKNKMKPRELREAQKKARQLKAAEINNNAAPAIAAMPAAEAAAPAAEKKKSSVKAAGMKSILVSENKMYITSFGKGNSAVLEYEVDKVDNNVYNQTQLSSKGSSNIKLCGVNEVNITFSSKHGFESGVEINTSNPTHRSGESSPVRGDMLGLKSELEKRFFGKTFDDNIHIQLIYNILDIEKILAVYVTNIVYALNNMLGIKGSESYDDFMGYLSARNTYEVFTHPDKSSLSDDKKANVRKSLSKFNVLLKTKRLGYFGLEEPKTKDTRVSQAYKKRVYHMLAIVGQIRQSVFHDKSSKLHEDLYSFIDIIDSEYRETLDYLVDERFDSINKGFIQGNKVNISLLIDMMKDDYEADDIIRLYYDFIVLKSQKNLGFSIKKLREKMLDEYGFRFKDKQYDSVRSKMYKLMDFLLFCNYYRNDVIAGEALVRKLRFSMTDDEKEGIYADEAAKLWGKFRNDFENIADHMNGDVIKELGKADMDFDEKILDSEKKNASDLLYFSKMIYMLTYFLDGKEINDLLTTLISKFDNIKEFLKIMKSSAVDVECELTAGYKLFNDSQRITNELFIVKNIASMRKPAASAMLTMFRDALTILGIDDKITDDRISEILKLKEKGKGIHGLRNFITNNVIESSRFVYLIKYANAQKIREVAKNEKVVMFVLGGIPDTQIERYYKSCVEVPDMNSSLEAKRSELARMIKSISFDDFKNVKQQAKGRENVAKEMAKAVIGLYLTVMYLLVKNLVNVNARYVIAIHCLERDFGLYKEIISELASKNLKNDYRILSQTLCELCDNCDESPNLFLKKNKRLRKCVEVDINNADSSMTRKYRNCIAHLTVVRELKEYIGDIRTVDSYFSIYHYVMQRCITKREDDKKQEEKIKYEDDLLKNHGYTKDFVKALNSPFGYNIPRFKNLSIEQLFDRNEYLTEK

SEQ ID NO: 247 - protein, 922 aa, Unknown
  human gut metagenome sequence
MAKKNKMKPRELREAQKKARQLKAVEINNNAVPEIAAMPAAEVIAPVAEKKKSSVKAAGMKSILVSENKMYITSFGKGNSAVLEYEVDNNDYNKTQLSSKNSSNIELRGVNEVNITFSSKHGFESGVEINTSNPTHRSGESSPVRWDMLGLKSELEKRFFGKTFDDNIHIQLIYNILDIEKILAVYVTNIVYALNNMLGIKGSESYDDFMGYLSARNTYEVFTHPDKSSLSDDKKANVRKSLSKFNVLLKTKRLGYFGLEEPKTKDTRVSQAYKKRVYHMLAIVGQIRQSVFHDKSSKLDEDLYSFIDIIDSEYRETLDYLVDERFDSINKGFIQGNKVNISLLIDMMKGYEADDIIRLYYDFIVLKSQKNLGFSIKKLREKMLEEYGYRFKDKQYDSVRSKMYKLMDFLLFCNYYRNDVVAGEALVRKLRFSMTDDEKEGIYADEAEKLWGKFRNDFENIADHMNGDVIKELGKADMDFDEKILDSEKKNASDLLYFSKMIYMLTYFLDGKEINDLLTTLISKFDNIKEFLKIMKSSAVDVECELTAGYKLFNDSQRITNELFIVKNIASMRKPAASAKLTMFRDALTILGIDDKITDDRISEILKLKEKGKGIHGLRNFITNNVIESSRFVYLIKYANAQKIREVAENEKVVMFVLGGIPDTQIERYYKSCVEFPDMNSSLEAKRSELARMIKNISFDNFKNVKQQAKGRENVAKERAKAVIGLYLTVMYLLVKNLVNVNARYVIAIHCLERDFGLYKEIIPELASKNLKNDYRILSQTLCELCDDRDESPNLFLKKNKRLRKCVEVDINNADSSMTRKYRNCIAHLTVVRELNKYIKDIRTVDSYFSIYHYVMQRCITKRENDTKQEDKIKYEDDLLKNHGYTKDFVKALNSPFGYNIPRFKNLSIEQLFDRNEYLTEK

SEQ ID NO: 248 - protein, 925 aa, Unknown
  human gut metagenome sequence
MAKKNKMKPRELREAQKKARQLKAAEINNNAAPAIAAMPAAEVIAPAAEKKKSSVKAAGMKSILVSENKMYITSFGKGNSAVLEYEVDKVDDNDYNQTQLSSKDNSNIELGDVNEVNITFSSKHGFESGVEINTSNPTHRSGESSPVRGDMLGLKSELEKRFFGKTFDDNIHIQLIYNILDIEKILAVYVTNIVYALNNMLGVKGSESHDDFIGYLSTNNIYDVFIDPDNSSLSDDKKANVRKSLSKFNALLKTKRLGYFGLEEPKTKDNRVSQAYKKRVYHMLAIVGQIRQCVFHDKSGAKRFDLYSFINNIDPEYRDTLDYLVEERLKSINKDFIEDNKVNISLLIDMMKDYEADDIIRLYYDFIVLKSQKNLGFSIKKLREKMLDEYGYRFKDKQYDSVRSKMYKLMDFLLFCNYYRNDVVAGESLVRKLRFSMTDDEKEGIYADEASKLWGKFRNDFENIADHMNGDVIKELGKADMDFDEKILDSEKKNASDLLYFSKMIYMLTYFLDGKEINDLLTTLISKFDNIKEFLKIMKSSAVNVECELTAGYKLFNDSQRITNELFIVKNIASMRKPAASAKLTMFRDALTILGIDDNITDDRISEILKLKEKGKGIHGLRNFITNNVIESSRFVYLIKYANAQKIREVAKNEKVVMFVLGGIPDTQIERYYKSCVEFPDMNSSLKAKRSELARMIKNISFEDFKDVKQQAKGRENVAKERAKAVIGLYLTVMYLLVKNLVNVNARYVIAIHCLERDFGLYKEIIPELASKNLKNDYRILSQMLCELCDDRDKSPNLFLKKNKRLRKCVEVDINNADSSMTRKYRNCIAHLTVVRELKEYIGDIYAVDSYFSIYHYVMQRCITKRENDTKQEEKIKYEDNLLKNHGYTKDFVKALNSPFGYNIPRFKNLSIEQLFDRNEYLTEK

SEQ ID NO: 249 - protein, 923 aa, Unknown
  human gut metagenome sequence
MAKKNKMKPRELREAQKKARQLKAAEINNNAAPAIAAMPAAEAAAPAAEKKKSSVKAAGMKSILVSENKMYITSFGKGNSAVLEYEVDNNDYNQTQLSSKGSSNIELHGVNEVNITFSSKHGFESGVEINTSNPTHRSGESSPVRWDMLGLKSELEKRFFGKTFDDNIHIQLIYNILDIEKILAVYVTNIVYALNNMLGIKKSESYDDFMGYLSARNTYEVFTHPDKSNLSDKVKGNIKKSLSKFNVLLKTKRLGYFGLEEPKTKDTNALEAYKKRVYHMLAIVGQIRQSVFHDKSSKLHEDLYSFIDIIDSEYRETLDYLVDERFDSINKGFIQGNKVNISLLIDMMKDDYEADDIIRLYYDFIVLKSQKNLGFSIKKLREKMLDEYGFRFKDKQYDSVRSKMYKLMDFLLFCNYYRNDVAAGEALVRKLRFSMTDDEKEGIYADEAEKLWGKFRNDFENIADHMNGDVIKELGKADMDFDEKILDSEKKNASDLLYFSKMIYMLTYFLDGKEINDLLTTLISKFDNIKEFLKIMKSSAVNVECELTAGYKLFNDSQRITNELFIVKNIASMRKPAASAKLTMFRDALTILGIDDKITDDRISEILKLKEKGKGIHGLRNFITNNVIESSRFVYLIKYANAQKIREVAKNEKVVMFVLGGIPDTQIERYYKSCVEFPDMNSSLEAKRSELARMIKNISFDDFKNVKQQAKGRENVAKERAKAVIGLYLTVMYLLVKNLVNVNARYVIAIHCLERDFGLYKEIIPELASKNLKNDYRILSQTLCELCDDRDESPNLFLKKNKRLRKCVEVDINNADSSMTRKYRNCIAHLTVVRELKEYIGDIRTVDSYFSIYHYVMQRCITKRENDTKQEEKIKYEDDLLKNHGYTKDFVKALNSPFGYNIPRFKNLSIEQLFDRNEYLTEK

SEQ ID NO: 250 - protein, 915 aa, Unknown
  human gut metagenome sequence
MKPRELREAQKKARQLKAAEINNNAAPAIAAMPAAEVIAPAAEKKKSSVKAAGMKSILVSENKMYITSFGKGNSAVLEYEVDNNDYNKTQLSSKDNSNIELGDVNEVNITFSSKHGFGSGMKINTSNPTHRSGESSPVRWDMLGLKSELEKRFFGKTFDDNIHIQLIYNILDIEKILAVYVTNIVYALNNMLGEGDDSNYDFMGYLSTFNTYKVFTNPNGSTLSDDKKKNIRKSLRKFNDLLKTKRLGYFGLEEPKTKDNRVSEAYKKRVYHMLAIVGQIRQCVFHDKSGAKRFDLYSFINNIYPEYRDTLDYLVDERFDSINKGFIQGNKVNISLLIDMMKGYEPDDIIRLYYDFIVLKSQKNLGFSIKKLREKMLDEYGFRFKDKQYDSVRSKMYKLMDFLLFCNYYRNDIAAGESLVRKLRFSMTDDEKEGIYADEAAKLWGKFRNDFENIADHMNGDVIKELGKADMDFDEKILDSEKKNASDLLYFSKMIYMLTYFLDGKEINDLLTTLISKFDNIKEFLKIMKSSAVDVECELTVGYKLFNDSQRITNELFIVKNIASMRKPAASAKLTMFRDALTILGIDDKITDDRISEILKLKEKGKGIHGLRNFITNNVIESSRFVYLIKYANAQKIRKVAENEKVVMFVLGGIPDAQIERYYKSCVEFPDMNSSLEVKRSELARMIKNISFDDFKNVKQQAKGRENVAKERAKAVIGLYLTVMYLLVKNLVNVNARYVIAIHCLERDFGLYKEIIPELASKNLKNDYRILSQTLCELCDNGDESPNLFLKKNKRLRKCVEVDINNADSNMTRKYRNCIAHLTVVRELNKYIKDIRTVDSYFSIYHYVMQRCITKREDDKKQEEKIKYEDDLLKNHGYTKDFVKALNSPFGYNIPRFKNLSIEQLFDRNEYLTEK

SEQ ID NO: 251 - protein, 922 aa, Unknown
  human gut metagenome sequence
MAKKNKMKPRELREAQKKARQLKAAEINNNAAPAIAAMPAAEVIAPAAEKKKSSVKAAGMKSILVSENKMYITSFGKGNSAVLEYEVDNNDYNKTQLSSESSSNIELCGVTKVNITFSSKHGFGSGVEINTSNPTHRSGESSPVRWDMLGLKSELEKRFFGKTFDDNIHIQLIYNILDIEKILAVYVTNIVYALNNMLGVKGSESYDDFMGYLSAQNTYYIFTHPDKSNLSDKVKGNIKKSLSKFNDLLKTKRLGYFGLEEPKTKDTRVSQAYKKRVYHMLAIVGQIRQCVFHDKSGAKRFDIYSFINNIDPEYRETLDYLVDERFDSINKGFIQGNKVNISLLIDMMKGYEADDIIRLYYDFIVLKSQKNLGFSIKKLREKMLDEYGFRFKDKQYDSVRSKMYKLMDFLLFCNYYRNDVVAGEALVRKLRFSMTDDEKEGIYADEAEKLWGKFRNDFEYIADHMNGDVIKELGKADMDFDEKILDSEKKNASDLLYFSKMIYMLTYFLDGKEINDLLTTLISKFDNIKEFLKIMKSSAVDVECELTAGYKLFNDSQRITNELFIVKNIASMRKPAASAKLTMFRDALTILGIDDNITDDRISEILKLKEKGKGIHGLRNFITNNVIESSRFVYLIKYANAQKIREVAENEKVVMFVLGGIPDTQIERYYKSCVEVPDMNSSLEAKRSELARMIKNISFDDFKNVKQQAKGRENVAKERAKAVIGLYLTVMYLLVKNLVNVNARYVIAIHCLERDFGLYKEIIPELASKNLKNDYRILSQTLCELCDDRDESPNLFLKKNKRLRKCVEVDINNADSSMTRKYRNCIAHLTVVRELKEYIGDIRTVDSYFSIYHYVMQRCITKREDDKKQEEKIKYEDDLLKNHGYTKDFVKALNSPFGYNIPRFKNLSIEQLFDRNEYLTEK

SEQ ID NO: 252 - protein, 952 aa, Unknown
  human gut metagenome sequence
MGKKIHARDLREQRKTDRTEKFADQNKKREAQRAVQKKDAAVSVKSVSSVSSKKDNVTKSMAKAAGVKSVFAVGNTVYMTSFGRGNDAVLEQKIVDTSHEPLNIDDPAYQLNVVTMNGYSVTGHRGETVSAVTDNPLRRFNGRKKDEPEQSVPTDMLCLKPTLEKKFFGKEFDDNIHIQLIYNILDIEKILAVYSTNAIYALNNMSADENIENSDFFMKRTTDETFDDFEKKKESTNSREKADFDAFEKFIGNYRLAYFADAFYVNKKNPKGKARNVLREDKELYSVLTLIGKLRHWCVHSEEGRAEFWLYKLNELKDDFKNVLDVVYNRPVEEINNRFIENNKVNIQILGSVYKNTDIAELVRSYYEFLITKKYKNMGFSIKKLRESMLEGKGYADKEYDSVRNKLYQMTDFILYTGYINEDSDRADDLVNTLRSSLKEDDKTTVYCKEADYLWKKYCESIREVAEALDGDNIKRLSKSNIEIRDNELRKCFISYADSVSEFTKLIYLLTRFLSGKEINDLVTTLINKFDNIRSFLEIMDELGLDRTFTAEYSFFEGSTKYLAELVELNSFVKSCSFDINAKRTMYRDALDILGIKSGKTEEDIEKMIDNILQIDANGDKKLEKNNGLRNFIASNVIDSNRFKYLVRYGNPKKIRETAKCKPAVRFVLNEIPDAQIERYYEACCPKNTALCSANKRREKLADMIAEIKFENFSDAGNYQKANVTSKTHEAEIKRKNQAIIRLYLTVMYIMLKNLVNVNARYVIAFHCVERDTKLYAESGLEVGNIEKNKTNLTMAVMGVKLENGIIKTEFDKSLAENAANRYLRNARWYKLILDNLKKSERAVVNEFRNTVCHLNAIRNININIDGIKEVENYFALYHYLIQKHLENRFADNGGSTGDYIGKLEEHKTYCKDFVKAYCTPFGYNLVRYKNLTIDGLFDKNYPGKDDSDEQK

SEQ ID NO: 253 - protein, 922 aa, Unknown
  human gut metagenome sequence
MAKKNKMKPRELREAQKKARQLKAAEINNNAVPAIAAMPAAEAAAPAAEKKKSSVKAAGMKSILVSENKMYITSFGKGNSAVLEYEVDNNDYNKTQLSSKDNSNIELCDVDEVNITFSSKHGFESGVKINTSNPTHRSGESSSVRGDMLGLKSELEKRFFGKTFDDNIHIQLIYNILDIEKILAVYVTNIVYALNNMLGLENESNNDFMGYLSAKNTYDVFTDPDESDLSKNIKGNIKKSLSKFNDLLKTKRLGYFGLEEPKTKDKRVSEAYKKRVYHMLAIVGQIRQSVFHDKSNELDEYLYSFIDIIDSEYRETLDYLIDERFDSINKGFIQGNKVNISLLIDMMKDDYEADDIIRLYYDFIVLKSQKNLGFSIKKLREKMLDEYGFRFKDKQYDSVRSKMYKLMDFLLFCNYYRNDVIAGEALVRKLRFSMTDDEKEGIYADEAAKLWGKFRNDFENIADHMNGDVIKELGKADMDFDEKILDSEKKNASDLLYFSKMIYMLTYFLDGKEINDLLTTLISKFDNIKEFLKIMKSSAVNVECELTAGYKLFNDSQRITNELFIVKNIASMRKPAASAKLTMFRDALTILGIDDKITDDRISEILKLKEKGKGIHGLRNFITNNVIESSRFVYLIKYANAQKIREVAENEKVVMFVLGGIPDTQIERYYKSCVEFPDMNSSLEVKRSELARMIKNIRFDDFKNVKQQAKGRENVAKERAKAVIGLYLTVMYLLVKNLVNVNARYVIAIHCLERDFGLYKEIIPELASKNLKNDYRILSQTLCELCDNGDESPNLFLKKNRRLRKCVEVDINNADSSMTRKYRNCIAHLTVVRELKEYIGDIRTVDSYFSIYHYVMQRCITKREDDTKQEDKIKYEDDLLKNHGYTKDFVKALNSPFGYNIPRFKNLSIEQLFDRNEYLTEK

SEQ ID NO: 254 - protein, 922 aa, Unknown
  human gut metagenome sequence
MAKKNKMKPRELREAQKKARQLKAAEINNNAAPAIAAMPAAEVIAPAAEKKKSSVKAAGMKSILVSENKMYITSFGKGNSAVLEYEVDKVDNNNYNKTQLSSKDNSNIELGDVNEVNITFSSKRGNESGVEINTSNPTHRSGESSPVRWDMLGLKSELEKRFFGKTFDDNIHIQLIYNILDIEKILAVYVTNIVYALNNMLGIKKSESYDDFMGYLSARNTYEVFTHPDKSNLSDKAKGNIKKSFSTFNDLLKTKRLGYFGLEEPKTKDTRVSQAYKKRVYHMLAIVGQIRQSVFHDKSSKLDEDLYSFIDIIDSEYRETLDYLVDERFDSINKGFIQGNKVNISLLIDMMKGYETDDIIRLYYDFIVLKSQKNLGFSIKKLREKMLDEYGFRFKDKQYDSVRSKMYKLMDFLLFCNYYRNDVVAGEALVRKLRFSMTDDEKEGTYADEAEKLWGKFRNDFENIADHMNGDAIKELGKADMDFDEKILDSEKKNASDLLYFSKMIYMLTYFLDGKEINDLLTTLISKFDNIKEFLKIMKSSAVDVECELTAGYKLFNDSQRITNELFIVKNIASMRKPAASAKLTMFRDALTILGIDDNITDDRISEILKLKEKGKGIHGLRNFITNNVIESSRFVYLIKYANAQKIREVAKNEKVVMFVLGGIPDTQIERYYKSCVEFPDMNSSLEAKRSELARMIKNISFDDFKNVKQQAKGRENVAKERAKAVIGLYLTVMYLLVKNLVNVNARYVIAIHCLERDFGLYKEIIPELASKNLKNDYRILSQTLCELCDKSPNLFLKKNERLRKCVEVDIYNADSSMTRKYRNCIAHLTVVRELKEYIGDIRTVDSYFSIYHYVMQRCITKREDDTKQEEKIKYEDDLLKNHGYTKDFVKALNSPFGYNIPRFKNLSIEQLFDRNEYLTEK

SEQ ID NO: 255 - protein, 923 aa, Unknown
  human gut metagenome sequence
MAKKNKMKPRELREAQKKARQLKAAEINNNAVPAIAAMPAAEVIAPAAEKKKSSVKAAGMKSILVSENKMYITSFGKGNSAVLEYEVDKVDDNDYNKTQLSSKDNSNIELGNVNEVNITFSSRRGFESGVEINTSNPTHRSGESSSVRGDMLGLKSELEKRFFGKTFDDNIHIQLIYNILDIEKILAVYVTNIVYALNNMLGVKGSESYDDFMGYLSAQNTYYIFTHPDKSNLSDKVKGNIKKSLSKFNDLLKTKRLGYFGLEEPKTKDKRVSEAYKKRVYHMLAIVGQIRQSVFHDKSNELDEYLYSFIDIIDSEYRDTLDYLVDERFDSINKGFIQGNKVNISLLIDMMKDDYEADDIIRLYYDFIVLKSQKNLGFSIKKLREKMLEEYGFRFKDKQYDSVRSKMYKIMDFLLFCNYYRNDVVAGEALVRKLRFSMTDDEKEGIYADEAAKLWGKFRNDFENIADHMNGDVIKELGKADMDFDEKILDSEKKNASDLLYFSKMIYMLTYFLDGKEINDLLTTLISKFDNIKEFLKIMKSSAVDVECELTAGYKLFNDSQRITNELFIVKNIASMRKPAASAKLTMFRDALTILGIDDKITDDRISEILKLKEKGKGIHGLRNFITNNVIESSRFVYLIKYANAQKIREVAKNEKVVMFVLGGIPDTQIERYYKSCVEFPDMNSSLEVKRSELARMIKNISFDDFKNVKQQAKGRENVAKERAKAVIGLYLTVMYLLVKNLVNVNARYVIAIHCLERDFGLYKEIIPELASKNLKNDYRILSQTLCELCDKSPNLFLKKNERLRKCVEVDINNADSSMTRKYRNCIAHLTVVRELKEYIGDIRTVDSYFSIYHYVMQRCITKRENDTKQEDKIKYEDDLLKNHGYTKDFVKALNSPFGYNIPRFKNLSIEQLFDRNEYLTEK

SEQ ID NO: 256 - protein, 919 aa, Unknown
  human gut metagenome sequence
MAKKNKMKPRELREAQKKARQLKAAEINNNAVPAIAAMPAAEAAAPAAEKKKSSVKAAGMKSILVSENKMYITSFGKGNSAVLEYEVDNNDYNKTQLSSKDNSNIELCDVNEVNITFSSKHGFESGVEINTSNPTHRSGESSPVRWDMLGLKSELEKRFFGKTFDDNIHIQLIYNILDIEKILAVYITNIVYALNNMLGVKGSESHDDFIGYLSTNNIYDVFIDPDNSSLSDDKKANVRKSLSKFNALLKTKRLGYFGLEEPKTKDNRVSEAYKKRVYHMLAIVGQIRQSVFHDKSSKLHEDLYSFIDIIDSEYRETLDYLVDERFDSINKGFIQGNKVNISLLIDMMKGYEADDIIRLYYDFIVIKSQKNLGFSIKKLREKMLDEYGFRFKDKQYDSVRSKMYKLMDFLLFCNYYRNDVVAGEALVRKLRFSMTDDEKEGIYADEAEKLWGKFRNDFENIADHMNGDVIKELGKADMDFDEKILDSEKKNASDLLYFSKMIYMLTYFLDGKEINDLLTTLISKFDNIKEFLKIMKSSAVNVECELTAGYKLFNDSQRITNELFIVKNIASMRKPAASAKLTMFRDALTILGIDDKITDDRISEILKLKEKGKGIHGLRNFITNNVIESSRFVYLIKYANAQKIREVAKNEKVVMFVLGGIPDTQIERYYKSCVEFPDMNSSLEAKRSELARMIKNISFDDFKNVKQQAKGRENVAKERAKAVIGLYLTVMYLLVKNLVNVNARYVIAIHCLERDFGLYKEIIPELASKNLKNDYRILSQTLCELCDKSPNLFLKKNKRLRKCVEVDINNADSSMTRKYRNCIAHLTVVRELKEYIGDIRTVDSYFSIYHYVMQRCITKRENDTKQEDKIKYEDDLLKNHGYTKDFVKALNSPFGYNIPRFKNLSIEQLFDRNEYLTEK

SEQ ID NO: 257 - protein, 925 aa, Unknown
  human gut metagenome sequence
MAKKNKMKPRELREAQKKARQFKAAEINNNAAPAIAAMPAAEVIAPVAEKKKSSVKAAGMKSILVSENKMYITSFGKGNSAVLEYEVDNNDYNKTQLSSKDNSNIELCGVNEVNITFSSKHGFESGVEINTSNPTHRSGESSPVRWDMLGLKSELEKRFFGKTFDDNIHIQLIYNILDIEKILAVYVTNIVYALNNMLGEGDESNYDFMGYLSTFNTYKVFTNPNGSTLSDDKKENIRKSLSKFNALLKTKRLGYFGLEEPKTKDTRVLEAYKKRVYHMLAIVGQIRQCVFHDLSEHSEYDLYSFIDNSKKVYRECRETLDYLVDERFDSINKGFIQGNKVNISLLIDMMKGYEADDIIRLYYDFIVLKSQKNLGFSIKKLREKILDEYGFRFKDKQYDSVRSKMYKLMDFLLFCNYYRNDIAAGESLVRKLRFSMTDDEKEGIYADEAAKLWGKFRNDFENIADHMNGDVIKELGKADMDFDEKILDSEKKNASNRFILFSTMIYMLTYFLDGKEINDLLTTLISKFDNIKEFLKIMKSSAIDVECELTAGYKLFNDSQRITNELFIVKNIASMRKPAASAKLTMFRDALTILGIDDKITDDRISEILKLKEKGKGIHGLRNFITNNVIESSRFVYLIKYANAQKIREVAKNEKVVMFVLGGIPDTQIERYYKSCVEFPDMNSSLEAKRSELARMIKNIRFDDFKNVKQQAKGRENVAKERAKAVIGLYLTVMYLLVKNLVNVNARYVIAIHCLERDFGLYKEIIPELASKNLKNDYRILSQTLCELCDNGDESPNLFLKKNKRLRKCVEVDINNADSSMTRKYRNCIAHLTVVRELKEYIGDIRTVDSYFSIYHYVMQRCITKREDDTKQEEKIKYEDDLLKNHGYTKDFVKALNSPFGYNIPRFKNLSIEQLFDRNEYLTEK

SEQ ID NO: 258 - protein, 922 aa, Unknown
  human gut metagenome sequence
MAKKNKMKPRELREAQKKARQLKAAEINNNATPTIAAMPAAEVIAPAAEKKKSSVKAAGMKSILVSKNKMYITSFGKGNSAVLEYEVDNNDYNQTQLSSKNSSNIELRGVNEVNITFSSKHGFESGVEINTSNPTHRSGESSSVRGDMLGLKSELEKRFFGKTFDDNIHIQLIYNILDIEKILAVYVTNIVYALNNMLGIKDSESYDDFIGYLSARNTYKVFTHPDKSNLSDKVKGNIKKSFSTFNDLLKTKRLGYFGLEEPKTKDTRVSQAYKKRVYHMLAIVGQIRQSVFHDKSSKLDEDLYSFIDIIDPEYRETLDYLVDERFDSINKGFIQGNKVNISLLIDMMKGYEADDIIRLYYDFIVLKSQKNLGFSIKKLREKMLDEYGFRFKDKQYDSVRSKMYKLMDFLLFCNYYRNDVVAGEALVRKLRFSMTDDEKEGIYADEAAKLWGKFRNDFENIADHMNGEAIKELGKADMDFDEKILDSEKKNASDLLYFSKMIYMLTYFLDGKEINDLLTTLISKFDNIKEFLKIMKSSAVDVECELTAGYKLFNDSQRITNELFIVKNIASMRKPAASAKLTMFRDALTILGIDDNITDDRISEILKLKEKGKGIHGLRNFITNNVIESSRFVYLIKYANAQKIREVAKNEKVVMFVLGGIPDTQIERYYKSCVEFPDMNSSLEAKRSELARMIKNIGFDDFKNVKQQAKGRENVAKERAKAVIGLYLTVMYLLVKNLVNVNARYVIAIHCLERDFGLYKEIIPELASKNLKNDYRILSQTLCELCDDRDESPNLFLKKNKRLRKCVEVDINNADSSMTRKYRNCIAHLTVVRELKEYIGDIRTVDSYFSIYHYVMQRCITKREDDTKQEDKIKYEDDLLKNHGYTKDFVKALNSPFGYNIPRFKNLSIEQLFDRNEYLTEK

SEQ ID NO: 259 - protein, 984 aa, Unknown
  human gut metagenome sequence
MKKKNIRATREALKAQKIKKSQENEALKKQKLAEEAAQKRREELEKKNLAQWEETSAEGRRSRVKAVGVKSVFVVGDDLYLATFGNGNETVLEKKITPDGKITTFPEEETFTAKLKFAQTEPTVATSIGISNGRIVLPEISVDNPLHTTMQKNTIKRSAGEDILQLKDVLENRYFDRSFNDDLHIRLIYNILDIEKILAEYTTNAVFAIDNVSGCSDDFLSNFSTRNQWDEFQNPEQHREHFGNKDNVICSVKKQQDLFFNFFKNNRIGYFGKAFFHAESERKIVKKTEKEVYHILTLIGSLRQWITHSTEGGISRLWLYQLEDALSREYQETMNNCYNSTIYGLQKDFEKTNAPNLNFLAEILGKNASELAEPYFRFIITKEYKNLGFSIKTLREMLLDQPDLQEIRENHNVYDSIRSKLYKMIDFVLVYAYSNERKSKADALASNLRSAITEDAKKRIYQNEADQLWTSYQELFKRIRGFKGAQVKEYSSKNMPIPIQKQIQNILKPAEQVTYFTKLMYLLTMFLDGKEINDLLTTLINKFDNISSLLKTMEQLELQTTFKEDYTFFQQSSRLCKEITQLKSFARMGNPISNLKEVMMVDAIQILGTEKSEQELQSMACFFFRDKNGKKLNTGEHGMRNFIGNNVISNTRFQYLIRYGNPQKLHTLSQNETVVRFVLSRIAKNQRVQGMNGKNQIDRYYETCGGTNSWSVSEEEKINFLCKILTNMSYDQFQDVKQSGAEITAEEKRKKERYKAIISLYLTVLYQLIKNLVNINARYIIAFHCLERDAILYSSKFNTSINLKKRYTALTEMILGYETDEKARRKDTRTVYEKAEAAKNRHLKNVKWNCKTRENLENADKNAIVAFRNIVAHLWIIRDADRFITGMGAMKRYFDCYHYLLQRELGYILEKSNQGSEYTKKSLEKVQQYHSYCKDFLHMLCLPFAYCIPRYKNLSIAELFDRHEPEAEPKEEASSVNNSQFITT

SEQ ID NO: 260 - protein, 922 aa, Unknown
  human gut metagenome sequence
MAKKNKMKPRELREAQKKARQLKAAEINNNAVPAIAAMPAVEVIAPAAEKKKSSVKAAGMKSILVSENKMYITSFGKGNSAVLEYEVDNNDYNKTQLSSKDNSNIELGNVNEVNITFSSRRGFESGVEINTSNPTHRSGESSSVRGDMLGLKSELEKRFFGKTFDDNIHIQLIYNILDIEKILAVYVTNIVYALNNMLGVKGSESYDDFMGYLSAQNTYYIFTHPDKSNLSDKVKGNIKKSLSKFNDLLKTKRLGYFGLEEPKTKDKRVSEAYKKRVYHMLAIVGQIRQSVFHDKSNELDEYLYSFIDIIDSEYRDTLDYLVDERFDSINKGFIQGNKVNISLLIDMMKGYEADDIIRLYYDFIVLKSQKNLGFSIKKLREKMLDEYGFRFKDKQYDSVRSKMYKLMDFLLFCNYYRNDVVAGEALVRKLRFSMTDDEKEGIYADEAAKLWGKFRNDFENIADHMNGDVIKELGKADMDFDEKILDSEKKNASDLLYFSKMIYMLTYFLDGKEINDLLTTLISKFDNIKEFLKIMKSSAVDVECELTAGYKLFNDSQRITNELFIVKNIASMRKPAASAKLTMFRDALTILGIDDNITDDRISEILKLKEKGKGIHGLRNFITNNVIESSRFVYLIKYANAQKIREVAENEKVVMFVLGGIPDTQIERYYKSCVEVPDMNSSLEAKRSELARMIKNISFDDFKNVKQQAKGRENVAKERAKAVIGLYLTVMYLLVKNLVNVNARYVIAIHCLERDFGLYKEIIPELASKNLKNDYRILSQTLCELCDNGDESPNLFLKKNKRLRKCVEVDINNADSSMTRKYRNCIAHLTVVRELKEYIGDIRTVDSYFSIYHYVMQRCITKRENDTKQEEKIKYEDDLLKNHGYTRDFVKALNSPFGYNIPRFKNLSIKQLFDRNEYLTEK

SEQ ID NO: 261 - protein, 956 aa, Unknown
  human gut metagenome sequence
MAKKKRITAKERKQNHRESLMKKADSNAEKEKAKKPVVENKPDTAISKDNTPKPNKEIKKSKAKLAGVKWVIKANDDVAYISSFGKGNNSVLEKRIIGDVSSDVNKDSHMYVNPKYTKKNYEIKNGFSSGSSLTTHPNKPDKNSGMDALCLKIYFEKEIFKDKFNDNMHIQTIYNIFDIEKTLAKHITNIIYAVNSLDRSYIQSGNDTIGFGLNYRIPYAKYGRGKDSNGKPNNSNLKKRESFIKFYNNAKDRFGYFESVFYQNGKPISREKLYIYLNILNFVRNSTFHYNNTSTYLYRKEYKYTDKDNCSVKEFEFVSYLNEFVKNKFKNVNKNFISNEKNNLYIILNAYGEDIEDVEVVKKYSKELYKLSVLKTNKNLGVNVKKLRESAIEYGYCPLPYDKEKEVAKLSSIKHKLYKTYDFVITHYLNSNDKLLLEIVEALRLSKNDDEKENVYKIYAEKIFKAEYVINPIKTISNLFAEKGDKLFNEKVSISEEYVEDIRIDKNIHNFTKVIFFLTCFLDGKEINDLLTNIISKLQVIEDHNNVIKAIANNNDAVYKDYSDKYAVFKNSGKIATKLEAIKSIARMENKINKAFKEPLLKDAMLALGVSPNDLDEKYEKYFKTDVDADKDHQKVSTFLMNNVINNSRFKYVVKYINPADINRLAKNKHLVKFVLDQIPHKQIDSYYNSVCTVEEPSYKGKIQLLTKKITGLNFYSLFENCKIPNVEKEKKKAVITLYFTIIYILVKNLVNINGLYTLALYFVERDGFFYKKICEKKDKKKTNKDVDYLLLPEIFSGSKYREETKNLKLPKEKDREIMKKYLPNDEDRKEYNKFFKQYRNNIVHLNIIANLSKLTSTIDKEINSYFEIFHYCAQRVMFDYCKNNNKVVLAKMKDLAHIKSDCDEFSSKYTYPYSSAVLRFMNLPFAYNVPRFKNLSYQKFFDKQRLEALEKNLNI

SEQ ID NO: 262 - protein, 922 aa, Unknown
  human gut metagenome sequence
MAKKNKMKPRELREAQKKARQLKAAEINNNAAPAIAAMPAAEAAAPAAEKKKSSVKAAGMKSILVSENKMYITSFGKGNSAVLEYEVDKVDNNDYNQTQLSSKGSSNIELHGVNEVNITFSSKHGFESGVEINTSNPTHRSGESSPVRWDMLGLKSELEKRFFGKTFDDNIHIQLIYNILDIEKILAVYVTNIVYALNNMLGIKDSESYDDFMGYLSAKNTYDVFTDPDESDLSKNIKGNIKKSFSTFNDLLKTKRLGYFGLEEPKTKDTRVSEAYKKRVYHMLAIVGQIRQCVFHDKSGAKRFDLYSFINNIDPEYRDTLDYLVEERLKSINKDFIEGNKVNISLLIDMMKGYEADDIIRLYYDFIVLKSQKNLGFSIKKLREKMLDEYGFRFKDKQYDSVRSKMYKLMDFLLFCSYYRNDVVAGEALVRKLRFSMTDDEKEGIYADEAEKLWGKFRNDFENIADHMNGDVIKELGKADMDFDEKILDSEKKNASDLLYFSKMIYMLTYFLDGKEINDLLTTLISKFDNIKEFLKIMKSSAVDVECELTAGYKLFNDSQRITNELFIVKNIASMRKPAASAKLTMFRDALTILGIDDKITDDRISEILKLKEKGKGIHGLRNFITNNVIESSRFVYLIKYANAQKIREVAKNEKVVMFVLGGIPDTQIERYYKSCVEFPDMNSSLEVKRSELARMIKNISFDDFKNVKQQAKGRENVAKERAKAVIGLYLTVMYLLVKNLVNVNARYVIAIHCLERDFGLYKEIIPELASKNLKNDYRTLSQTLCELCDKSPNLFLKKNERLRKCVEVDINNADSIMTRKYRNCIAHLTVVRELKEYIGDIRTVDSYFSIYHYVMQRCITKRENDTKQEDKIKYEDDLLKNHGYTKDFVKALNSPFGYNIPRFKNLSIEQLFDRNEYLTEK

SEQ ID NO: 263 - protein, 926 aa, Unknown
  human gut metagenome sequence
MAKKNKMKPRELREAQKKARQLKVAEINNNAVPAIAAMPAAEAAAPAAEKKKSSVKAAGMKSILVSKNKMYITSFGKGNSAVLEYEVDKVDNDNYNKTQLSSKDNSNIELGDVDEVNITFSSKHGFESGVEINTSNPTHRSGESSPVRWDMLGLKSELEKRFFGKTFDDNIHIQLIYNILDIEKILAVYVTNIVYALNNMLGIKKSESYDDFMGYLSARNTYEVFTHPDKSNLSDKVKGNIKKSLSKFNVLLKTKRLGYFGLEEPKTKDTNALEAYKKRVYHMLAIVGQIRQSVFHDKSSKLHEDLYSFIDIIDSEYRETLDYLVDERFDSINKGFIQGNKVNISLLIDMMKDDYEADDIIRLYYDFIVLKSQKNLGFSIKKLREKMLDEYGFRFKDKQYDSVRSKMYKLMDFLLFCNYYRNDVVAGEALVRKLRFSMTDDEKEGIYADEAEKLWGKFRNDFENIADHMNGDVIKELGKADMDFDEKILDSEKKNASDLLYFSKMIYMLTYFLDGKEINDLLTTLISKFDNIKEFLKIMKSSAVNVECELTAGYKLFNDSQRITNELFIVKNIASMRKPAASAKLTMFRDALTILGIDDKITDDRISEILKLKEKGKGIHGLRNFITNNVIESSRFVYLIKYANAQKIREVAKNEKVVMFVLGGIPDTQIERYYKSCVEFPDMNSSLEAKRSELARMIKNISFDDFKNVKQQAKGRENVAKERAKAVIGLYLTVMYLLVKNLVNVNARYVIAIHCLERDFGLYKEIIPELASKNLKNDYRILSQTLCELCDDRDESPNLFLKKNRRLRKCVEVDINNADSSMTRKYRNCIAHLTVVRELKEYIGDIRTVDSYFSIYHYVMQRCITKREDDTKQEDKIKYEDDLLKNHGYTKDFVKALNSPFGYNIPRFKNLSIEQLFDRNEYLTEK

SEQ ID NO: 264 - protein, 919 aa, Unknown
  human gut metagenome sequence
MAKKNKMKPRERREAQKKARQLKAAEINNNAVPAIAAMPAAEVIAPAAEKKKSSVKAAGMKSILVSENKMYITSFGKGNSAVLEYEVDNNDYNKTQLSSKDNSNIELGDVNEVNITFSSRRGFESGVEINTSNPTHRSGESSSVRGDMLGLKSELEKRFFGKNFDDNIHIQLIYNILDIEKILAVYVTNIVYALNNMLGVKGSESYDDFMGYLSAKNTYEVFTHPDKSNLSDKVKGNIKKSFSTFNDLLKTKRLGYFGLEEPKTKDTRVSQAYKKRVYHMLAIVGQIRQSVFHDKSSKLHEDLYSFIDIIDSEYRETLDYLVEERLKSINKDFIEGNKVNISLLIDMMKGYEADDIIRLYYDFIVLKSQKNLGFSIKKLREKMLDEYGFRFKDKQYDPVRSKMYKLMDFLLFCNYYRNDVVTGEALVRKLRFSMTDDEKEGIYADEASKLWGKFRNDFENIADHMNGDVIKELGKADMDFDEKILDSEKKNASDLLYFSKMIYMLTYFLDGKEINDLLTTLISKFDNIKEFLKIMKSSAVDVECELTAGYKLFNDSQRITNELFIVKNIASMRKPASSAKLTMFRDALTILGIDDNITDDRISEILKLKEKGKGIHGLRNFITNNVIESSRFVYLIKYANAQKIRKVAKNEKVVMFVLGGIPDTQIERYYKSCVEFPDMNSSLEVKRSELARMIKNISFDDFKNVKQQAKGRENVAKERAKAVIGLYLTVMYLLVKNLVNVNARYVIAIHCLERDFGLYKEIIPELASKNLKNDYRILSQTLCELCDKSPNLFLKKNERLRKCVEVDINNADSSMTRKYRNCIAHLTVVRELKEYIGDIRTVDSYFSIYHYVMQRCITKRENDTKQEEKIKYEDDLLKNHGYTKDFVKALNSPFGYNIPRFKNLSIEQLFDRNEYLTEK

SEQ ID NO: 265 - protein, 922 aa, Unknown
  human gut metagenome sequence
MAKKNKMKPRELREAQKKARQLKAAEINNNAAPAIAAMPAAEVIAPVAEKKKSSVKAAGMKSILVSENKMYITSFGKGNSAVLEYEVDNNDYNKTQLSSKDNSNIELGDVNEVNITFSSKHGFGSGVEINTSNPTHRSGESSPVRGDMLGLKSELEKRFFGKTFDDNIHIQLIYNILDIEKILAVYVTNIVYALNNMLGIKDSESYDDFMGYLSARNTYEVFTHPDKSNLSDKVKGNIKKSLSKFNDLLKTKRLGYFGLEEPKTKDTRASEAYKKRVYHMLAIVGQIRQCVFHDKSGAKRFDLYSFINNIDPEYRDTLDYLVEERLKSINKDFIEGNKVNISLLIDMMKGYEADDIIRLYYDFIVLKSQKNLGFSIKKLREKMLEEYGFRFKDKQYDSVRSKMYKLMDFLLFCNYYRNDVAAGEALVRKLRFSMTDDEKEGIYADEAAKLWGKFRNDFENIADHMNGDVIKELGKADMDFDEKILDSEKKNASDLLYFSKMIYMLTYFLDGKEINDLLTTLISKFDNIKEFLKIMKSSAVDVECELTAGYKLFNDSQRITNELFIVKNIASMRKPAASAKLTMFRDALTILGIDDNITDDRISEILKLKEKGKGIHGLRNFITNNVIESSRFVYLIKYANAQKIREVAKNEKVVMFVLGGIPDTQIERYYKSCVEFPDMNSSLEAKRSELARMIKNISFDDFKNVKQQAKGRENVAKERAKAVIGLYLTVMYLLVKNLVNVNARYVIAIHCLERDFGLYKEIIPELASKNLKNDYRILSQTLCELCDDRDESPNLFLKKNKRLRKCVEVDINNADSSMTRKYRNCIAHLTVVRELKEYIGDIRTVDSYFSIYHYVMQRCITKRENDTKQEEKIKYEDDLLKNHGYTKDFVKALNSPFGYNIPRFKNLSIEQLFDRNEYLTEK

SEQ ID NO: 266 - protein, 928 aa, Unknown
  human gut metagenome sequence
MAKKNKMKPRELREAQKKARQLKAAEINNNAAPAIAAMPAAQVIAPAAEKKKSSVKAAGMKSILVSENKMYITSFGKGNSAVLEYEVDKVDNNVYNQTQLSSKGSSNIKLCGVNEVNITFSSKHGFESGVEINTSNPTHRSGESSPVRGDMLGLKSELEKRFFGKTFDDNIHIQLIYNILDIEKILAVYVTNIVYALNNMLGVKDSESYDDFMGYLSARNTYEVFTHPDKSNLSDKVKGNIKKSLSKFNDLLKTKRLGYFGLEEPKTKDTRVSQAYKKRVYHMLAIVGQIRQCVFHDLSEHSEYDLYSFIDNSKKVYRECRETLDYLVDERFDSINKGFIQGNKVNISLLIDMMKGYEADDIIRLYYDFIVLKSQKNLGFSIKKLREKMLDEYGYRFKDKQYDSVRSKMYKLMDFLLFCNYYRNDVVAGEALVRKLRFSMTDDEKEGIYADEAEKLWGKFRNDFENIADHMNGDVIKELGKADMDFDEKIIDSEKKNASDLLYFSKMIYMLTYFLDGKEINDLLTTLISKFDNIKEFLKIMKSSAVNVECELTAGYKLFNDSQRITNELFIVKNIASMRKPAASAKLTMFRDALTILGIDDNITDDRISEILKLKEKGKGIHGLRNFITNNVIESSRFVYLIKYANAQKIREVAENEKVVMFVLGGIPDTQIERYYKSCVEFHDMNSSLEAKRSELARMIKNISFDDFKNVKQQAKGRENVAKERAKAVIGLYLTVMYLLVKNLVNVNARYVIAIHCLERDFGLYKEIIPELASKNLKNDYRILSQTLCELCDDRDESPNLFLKKNKRLRKCVEVDINNADSSMTRKYRNCIAHLTVVRELKEYIGDIRTVDSYFSIYHYVMQRCITKREDDTKQEDKIKYEDDLLKNHGYTKDFVKALNSPFGYNIPRFKNLSIEQLFDRNEYLTEK

SEQ ID NO: 267 - protein, 924 aa, Unknown
  human gut metagenome sequence
MAKKNKMKPRELREAQKKARQLKAAEINNNAVPAIAAMPAAEVIAPAAEKKKSSVKAAGMKSILVSENKMYITSFGKGNSAVLEYEVDNNDYNKTQLSSKDNSNIELGNVNEVNITFSSKHGFESGVEINTSNPTHRSGESSPVRWDMLGLKSELEKRFFGKTFDDNIHIQLIYNILDIEKILAVYVTNIVYALNNMLGEGDESNYDFMGYLSTFNTYKVFTNPNGSTLSDDKKENIRKSLSKFNALLKTKRLGYFGLEEPKTKDTRVLEAYKKRVYHMLAIVGQIRQCVFHDLSEHSEYDLYSFIDNSKKVYRECRETLDYLVDERFDSINKGFIQGNKVNISLLIDMMKGYEADDIIRLYYDFIVLKSQKNLGFSIKKLREKILDEYGFRFKDKQYDSVRSKMYKLMDFLLFCNYYRNDIAAGESLVRKLRFSMTDDEKEGIYADEAAKLWGKFRNDFENIADHMNGDVIKELGKADMDFDEKILDSEKKNASDLLYFSKMIYMLTYFLDGKEINDLLTTLISKFDNIKEFLKIMKSSAVDVECELTAGYKLFNDSQRITNELFIVKNIASMRKPAASAKLTMFRDALTILGIDDKITDDRISEILKLKEKGKGIHGLRNFITNNVIESSRFVYLIKYANAQKIREVAKNEKVVMFVLGGIPDTQIERYYKSCVEFPDMNSSLEAKRSELARMIKNIRFDDFKNVKQQAKGRENVAKERAKAVIGLYLTVMYLLVKNLVNVNARYVIAIHCLERDFGLYKEIIPELASKNLKNDYRILSQTLCELCDNGDESPNLFLKKNKRLRKCVEVDINNADSNMTRKYRNCIAHLTVVRELKEYIGDIRTVDSYFSIYHYVMQRCITKREDDTKQEEKIKYEDDLLKNHGYTKDFVKALNSPFGYNIPRFKNLSIEQLFDRNEYLTEK

SEQ ID NO: 268 - protein, 918 aa, Unknown
  human gut metagenome sequence
MAKKNKMKPRERREAQKKARQLKAAEINNNAVPAIAAMPAAEAAAPAAEKKKSSVKAAGMKSILVSENKMYITSFGKGNSAVLEYEVDNNDYNKTQLSSKDNSNIELCDVGKVNITFSSRRGFESGVEINTSNPTHRSGESSSVRGDMLGLKSELEKRFFGKNFDDNIHIQLIYNILDIEKILAVYVTNIVYALNNMLGEGDESNYDFMGYLSTFNTYKVFTNPNGSTLSDDKKENIRKSLSKFNALLKTKRLGYFGLEEPKTKDTRASEAYKKRVYHMLAIVGQIRQCVFHDKSGAKRFDLYSFINNIDPEYRETLDYLVDERFDSINKGFIQGNKVNISLLIDMMKGYEADDIIRLYYDFIVLKSQKNLGFSIKKLREKMLEEYGYRFKDKQYDSVRSKMYKLMDFLLFCNYYRNDVVAGEALVRKLRFSMTDDEKEGIYADEASKLWGKFRNDFENIADHMNGDVIKELGKADMDFDEKILDSEKKNASDLLYFSKMIYMLTYFLDGKEINDLLTTLISKFDNIKEFLKIMKSSAVDVECELTAGYKLFNDSQRITNELFIVKNIASMRKPASSAKLTMFRDALTILGIDDNITDDRISEILKLKEKGKGIHGLRNFITNNVIESSRFVYLIKYANAQKIRKVAKNEKVVMFVLGGIPDTQIERYYKSCVEFPDMNSSLEVKRSELARMIKNISFDDFKNVKQQAKGRENVAKERAKAVIGLYLTVMYLLVKNLVNVNARYVIAIHCLERDFGLYKEIIPELASKNLKNDYRILSQTLCELCDESPNLFLKKNERLRKCVEVDINNADSSMTRKYRNCIAHLTVVRELKEYIGDIRTVDSYFSIYHYVMQRCITKREDDKKQEEKIKFEDDLLKNHGYTKDFVKALNSPFGYNIPRFKNLSIEQLFDRNEYLTEK

SEQ ID NO: 269 - protein, 922 aa, Unknown
  human gut metagenome sequence
MAKKNKMKPRELREAQKKARQFKAAEINNNAVPAIAAMPAAEAAAPAAEKKKSSVKAAGMKSILVSENKMYITSFGKGNSAVLEYEVDNNDYNKTQLSSEDSSNIELCGVNEVNITFSSKHGFESGVEINTSNPTHRSGESSPVRGDMLGLKSELEKRFFGKTFDDNIHIQLIYNILDIEKILAVYVTNIVYALNNMLGVKGSESHDDFIGYLSTNNIYDVFIDPDNSSLSDDKKANVRKSLSKFNALLKTKRLGYFGLEEPKTKDTRASEAYKKRVYHMLAIVGQIRQCVFHDKSGAKRFDLYSFINNIDPEYRDTLDYLVDERFDSINKGFIQGNKVNISLLIDMMKGYEADDIIRLYYDFIVLKSQKNLGFSIKKLREKMLEEYGYRFKDKQYDSVRSKMYKLMDFLLFCNYYRNDVVAGEALVRKLRFSMTDDEKEGIYADEAAKLWGKFRNDFENIADHMNGDVIKELGKADMDFDEKILDSEKKNASDLLYFSKMIYMLTYFLDGKEINDLLTTLISKFDNIKEFLKIMKSSAVDVECELTAGYKLFNDSQRITNELFVVKNIASMRKPAASAKLTMFRDALTILGIDDKITDDRISEILKLKEKGKGIHGLRNFITNNVIESSRFVYLIKYANAQKIREVAKNEKVVMFVLGGIPDTQIERYYKSCVEFPDMNSSLEAKRSELARMIKNISFDDFKNVKQQAKGRENVAKERAKAVIGLYLTVMYLLVKNLVNVNARYVIAIHCLERDFGLYKEIIPELASKNLKNDYRILSQTLCELCDDRDESPNLFLKKNERLRKCVEVDINNADSSMTRKYRNCIAHLTVVRELKEYIGDIRTVDSYFSIYHYVMQRCITKREDDTKQEEKIKYEDDLLKNHGYTKDFVKALNSPFGYNIPRFKNLSIEQLFDRNEYLTEK

SEQ ID NO: 270 - protein, 1023 aa, Unknown
  human gut metagenome sequence
MAKKITAKQKREEKERLNKQKWAKNDSVIIVPETKEEIKTGEIQDNNRKRSRQKSQAKAMGLKAVLSFDNKIAIASFVSSKNAKSSHIERITDKEGTTISVNSKMFESSVNKRDINIEKRITIEEPQQDGTIKKEEKGVKSTTCNPYFKVGGKDYIGIKEIAEEHFFGRAFPNENLRVQIAYNIFDVQKILGTFVNNIIYSFYNLSRDEVQSDNDVIGMLYSISDYDRQKETETFLQAKSLLKQTEAYYAYFDDVFKKNKKPDKNKEGDNSKQYQENLRHNFNILRVLSFLRQICMHAEVHVSDDEGCTRTQNYTDSLEALFNISKAFGKKMPELKTLIDNIYSKGINAINDEFVKNGKNNLYILSKVYPNEKREVLLREYYNFVVCKEGSNIGISTRKLKETMIAQNMPSLKEENTYRNKLYTVMNFILVRELKNCATIREQMIKELRANMDEEEGRDRIYSKYAKEIYLYVKDKLKLMLNVFKEEAEGIIIPGKEDPVKFSHGKLDKKEIESFCLTTKNTEDITKVIYFLCKFLDGKEINELCCAMMNKLDGISDLIETAKQCGEDVEFVDQFKCLSKCATMSNQIRIVKNISRMKKEMTIDNDTIFLDALELLGRKIEKYQKDKNGDYVKDEKGKKVYTKDYNNFQDMFFEGKNHRVRNFVSNNVIKSKWFSYVVRYNKPAECQALMRNSKLVKFALDELPDSQIEKYYISVFGEKSSSSNEEMRRELLKKLCDFSVRGFLDEIVLLSEDEMKQKDKFSEKEKKKSLIRLYLTIVYLITKSMVKINTRFSIACATYERDYILLCQSEKAERAWEKGATAFALTRKFLNHDKPTFEQYYTREREISAMPQEKRKELRKENDQLLKKTHYSKHAYCYIVDNVNNLTGAVANDNGRGLPCLSEKNDNANLFLEMRNKIVHLNVVHDMVKYINEIKNITSYYAFFCYVLQRMIIGNNSNEQNKFKAKYSKTLQEFGTYSKDLMWVLNLPFAYNLPRYKNLSNEQLFYDEEERMEKIVGRKNDSR

SEQ ID NO: 271 - protein, 921 aa, Unknown
  human gut metagenome sequence
MAKKNKMKPRELREAQKKARQLKAAEINNNAAPAIAAMPVAEAAAPAAEKKKSSVKAAGMKSILVSENKMYITSFGKGNSAVLEYEVDNNDYNKTQLSSKDNSNIELGDVNEVNITFSSKHGFESGVEINTSNPTHRSGESSPVRGDMLGLKSELEKRFFGKTFDDNIHIQLIYNILDIEKILAVYVTNIVYALNNMLGEGDESNYDFMGYLSTFNTYKVFTNPNGSTLSDDKKENIRKSLSKFNALLKTKRLGYFGLEEPKTKDTRVLEAYKKRVYYMLAIVGQIRQCVFHDLSEHSEYDLYSFIDNSKKVYRECRETLDYLVDERFDSINKGFIQGNKVNISLLIDMMKGYEPDDIIRLYYDFIVLKSQKNLGFSIKKLREKMLDEYGFRFKDKQYDSVRSKMYKLMDFLLFCNYYRNDVAAGEALVRKLRFSMTDDEKEGIYADEAAKLWGKFRNDFENIADHMNGDVIKELGKADMNFDEKILDSEKKNASDLLYFSKMIYMLTYFLDGKEINDLLTTLISKFDNIKEFLKIMKSSAVDVECELTAGYKLFNDSQRITNELFIVKNIASMRKPAASAKLTMFRDALTILGIDDKITDDRISEILKLKEKGKGIHGLRNFITNNVIESSRFVYLIKYANAQKIREVAKNEKVVMFVLGGIPDTQIERYYKSCVEFPDMNSSLEAKRSELARMIKNISFDDFKNVKQQAKGRENVAKERAKAVIGLYLTVMYLLVKNLVNVNARYVIAIHCLERDFGLYKEIIPELASKNLKNDYRILSQTLCELCDKSPNLFLKKNERLRKCVEVDINNADSSMTRKYRNRIAHLTVVRELKEYIGDIRTVDSYFSIYHYVMQRCITKREDDTKQGEKIKYEDDLLKNHGYTKDFVKALNSPFGYNIPRFKNLSIEQLFDRNEYLTEK

SEQ ID NO: 272 - protein, 954 aa, Unknown
  human gut metagenome sequence
MGKKIHARDLREQRKTDRTEKFADQNKKREAERAVPKKDAAVSVKSVSSVSSKKDNVTKSMAKAAGVKSVFAVENTVYMTSFGRGNDAVLEQKIVDTSHEQLNIDDPAYQLNVVTMNGYSVTGHRGETVSAVTDNPLRRFNGGKKDEPEQSVPTDMLCLKPTLEKKFFGKEFNDNIHIQLIYNILDIEKILAVYSTNAIYALNNMSADENIENSDFFMKRTTDETFDDFEKKKESTNSREKADFDAFEKFIGNYRLAYFADAFYVNKKNPKGKAKNVLREDKELYSVLTLIGKLRHWCVHSEDGRAEFWLYKLDELKDDFKNVLDVVYNRPVEEINNRFIENNKVNIQILGSVYKNTDIAELVRSYYEFLITKKYKNMGFSIKKLRESMLEGKGYADKEYDSVRNKLYQMTDFILYTGYINEDSDRADDLVNTLRSSLKEDDKTTVYCKEADYLWKKYRESIREVADALDGDNIKRLSKSNIEIQEDKLRKCFISYADSVSEFTKLIYLLTRFLSGKEINDLVTTLINKFDNIRSFLEIMDELGLDRTFTAEYSFFEGSTKYLAELVELNSFVKSCSFDINAKRTMYRDALDILGIKSGKTEEDIEKMIDNILQIDANGDKKLKKNNGLRNFIASNVIDSNRFKYLVRYGNPKKIRETAKCKPAVRFVLNEIPDAQIERYYEACCPKNTALCSANKRREKLADMIAEIKFENFSDAGNYQKANVTSRTSEAEIKRKNQAIIRLYLTVMYIMLKNLVNVNARYVIAFHCVERDTKLYAESGLEVGNIEKNKTNLTMAVMGVKLENGIIKTEFDKSLAENAANRYLRNARWYKLILDNLKKSERAVVNEFRNTVCHLNAIRNININIDGIKEVENYFALYHYLIQKHLENRFADKKVERDTGDFISKLEEHKTYCKDFVKAYCTPFGYNLVRYKNLTIDGLFDKNFPGKDDSDEQK

SEQ ID NO: 273 - protein, 925 aa, Unknown
  human gut metagenome sequence
MAKKNKMKPRELREAQKKARQLKAAEINNNAAPAIAAMPAAQVIAPAAEKKKSSVKAAGMKSILVSENKMYITSFGKGNSAVLEYEVDKVDNNNYNKTQLSSKDNSNIELGDVNEVNITFSSKHGFESGVEINTSNPTHRSGESSPVRWDMLGLKSELEKRFFGKTFDDNIHIQLIYNILDIEKILAVYVTNIVYALNNMLGIKGSESYDDFMGYLSARNTYEVFTHPDKSNLSDKVKGNIKKSLSKFNDLLKTKRLGYFGLEEPKTKDTRVSQAYKKRVYHMLAIVGQIRQSVFHDKSSKLDEDLYSFIDIIDSEYRETLDYLVDERFDSINKGFIQGNKVNISLLIDMMKGYEADDIIRLYYDFIVLKSQKNLGFSIKKLREKMLDEYGFRFKDKQYDSVRSKMYKLMDFLLFCNYYRNDVVAGEALVRKLRFSMTDDEKEWIYADEAEKLWGKFRNDFENIADHMNGDVIKELGKADMDFDEKILDSEKKNASDLLYFSKMIYMLTYFLDGKEINDLLTTLISKFDNIKEFLKIMKSSAVDVECELTASYKLFNDSQRITNELFIVKNIASMRKPAASAKLTMFRDALTILGIDDKITDDRISEILKLKEKGKGIHGLRNFITNNVIESSRFVYLIKYANAQKIREVAENEKVVMFVLGGIPDTQIERYYKSCVEFPDMNSSLEVKRSELARMIKNISFDDFKNVKQQAKGRENVAKERAKAVIGLYLTVMYLLVKNLVNVNARYVIAIHCLERDFGLYKEIIPELASKNLKNDYRILSQTLCELCDDRDESPNLFLKKNKRLRKCVEVDINNADSSMTRKYRNCIAHLTVVRELKEYIGDIRTVDSYFSIYHYVMQRCITKREDDKKQEEKIKYEDDLLKNHGYTKDFVKALNSPFGYNIPRFKNLSIEQLFDRNEYLTEK

SEQ ID NO: 274 - protein, 954 aa, Unknown
  human gut metagenome sequence
MGKKIHARDLREQRKTDRTVKFADQNKKREAERAVQKKDAAVSVKSVPSVSSKKDNVTKSMAKAAGVKSVFAVGNTVYMTSFGRGNDAVLEQKIVDTSHEPLNIDDPAYQLNVVTMNGYSVIGHRGETVSAVTDNPLRRFNGGKKDEPEQSVPTDMLCLKPTLEKKFFGKEFDDNIHIQLIYNILDIEKILAVYSTNAIYALNNMSADENIENSDFFMKRTTDETFDDFEKKKESTNSREKADFDAFEKFIGNYRLAYFADAFYVNKKNPKGKAKNVLREDKELYSVLTLIGKLRHWCVHSEEGRAEFWLYKLDELKDDFKNVLDVVYNRPVEEINNRFIENNKVNIQILGSVYKNTDIAELVRSYYEFLITKKYKNMGFSIKKLRESMLEGKGYADKEYDSVRNKLYQMTDFILYTGYINEDSDRADDLVNTLRSSLKEDDKTTVYCKEADYLWKKYRESIREVADALDVDNIKNLSGSNIEIRDNELRKCFISYADSVSEFTKLIYLLTRFLSGKEINDLVTTLINKFDNIRSFLEIMDELGLDRTFTAEYSFFEDSTKYLAELVELNSFVKSCSFDINAKRTMYRDALDILGIKSGKTEEDIEKMIDNILQIDANGDKKLKKNNGLRNFIASNVIDSNRFKYLVRYGNPKKIRETAKCKPAVRFVLNEIPDAQIERYYEACCPENTALCSANKKREKLADMIAEIEFENFSDAGNYQKANVTSKTHEAEIKRKNQSIIRLYLTVMYIMLKNLVNVNARYVIAFHCVERDTKLYAESGLEVGNIEKNKTNLTMAVMGVKLENGIIKTEFDKSLAENAANRYLRNARWYKLILDNLKKSERAVVNEFRNTVCHLNAIRNININIKEIKEVENYFALYHYLIQKHLENRFADKKVERDTGDFISKLEEHKTYCKDFVKAYCTPFGYNLVRYKNLTIDGLFDKNYPGKDDSDEQK

SEQ ID NO: 275 - protein, 925 aa, Unknown
  human gut metagenome sequence
MAKKNKMKPRELREAQKKARQLKAAEINNNAAPAIAAMPAAQVIAPAAEKKKSSVKAAGMKSILVSENKMYITSFGKGNSAVLEYEVDKVDNNNYNKTQLSSKDNSNIELGDVNEVNITFSSKHGFESGVEINTSNPTHRSGESSSVRGDMLGLKSELEKRFFGKTFDDNIHIQLIYNILDIEKILAVYVTNIVYALNNMLGVKGSESYDDFMGYLSAQNTYYIFTHPDKSNLSDKVKGNIKKSLSKFNDLLKTKRLGYFGLEEPKTKDKRVSEAYKKRVYHMLAIVGQIRQSVFHDKSNELDEYLYSFIDIIDSEYRDTLDYLVDERFDSINKGFVQGNKVNISLLIDMMKGYEADDIIRLYYDFIVLKSQKNLGFSIKKLREKMLDEYGFRFKDKQYDSVRSKMYKLMDFLLFCNYYRNDIAAGEALVRKLRFSMTDDEKEGLYADEAAKLWGKFRNDFENIADHMNGDVIKELGKADMDFDEKILDSEKKNASDLLYFSKMIYMLTYFLDGKEINDLLTTLISKFDNIKEFLKIMKSSAVNVECELTAGYKLFNDSQRITNELFIVKNIASMRKPAASAKLTMFRDALTILGIDDNITDDRISEILKLKEKGKGIHGLRNFITNNVIESSRFVYLIKYANAQKIREVAKNEKVVMFVLGGIPDTQIERYYKSCVEFPDMNSSLEVKRSELARMIKNIRFDDFKNVKQQAKGRENVAKERAKAVIGLYLTVMYLLVKNLVNVNARYVIAIHCLERDFGLYKEIIPELASKNLKNDYRILSQTLCELCDNRDESPNLFLKKNKRLRKCVEVDINNADSSMTRKYRNCIAHLTVVRELKEYIGDIRTVDSYFSIYHYVMQRCITKREDDTKQEDKIKYEDDLLKNHGYTKDFVKALNSPFGYNIPRFKNLSIEQLFDRNEYLTEK

SEQ ID NO: 276 - protein, 818 aa, Unknown
  human gut metagenome sequence
MAKKNKMKPRELREAQKKARQLKAAEINNNAAPAIAAMPAAQVIAPAAEKKKSSVKAAGMKSILVSENKMYITSFGKGNSAVLEYEVDKVDNNNYNKTQLSSKDNSNIELGDVNEVNITFSSKHGFESGVEINTSNPTHRSGESSPVRWDMLGLKSELEKRFFGKTFDDNIHIQLIYNILDIEKILAVYVTNIVYALNNMLGIKGSESYDDFMGYLSARNTYEVFTHPDKSNLSDKVKGNIKKSLSKFNDLLKTKRLGYFGLEEPKTKDTRVSQAYKKRVYHMLAIVGQIRQSVFHDKSSKLDEDLYSFIDIIDSEYRETLDYLVDERFDSINKGFIQGNKVNISLLIDMMKGYEADDIIRLYYDFIVLKSQKNLGFSIKKLREKMLDEYGFRFKDKQYDSVRSKMYKLMDFLLFCNYYRNDVVAGEALVRKLRFSMTDDEKEWIYADEAEKLWGKFRNDFENIADHMNGDVIKELGKADMDFDEKILDSEKKNASDLLYFSKMIYMLTYFLDGKEINDLLTTLISKFDNIKEFLKIMKSSAVDVECELTASYKLFNDSQRITNELFIVKNIASMRKPAASAKLTMFRDALTILGIDDKITDDRISEILKLKEKGKGIHGLRNFITNNVIESSRFVYLIKYANAQKIREVAENEKVVMFVLGGIPDTQIERYYKSCVEFPDMNSSLEVKRSELARMIKNISFDDFKNVKQQAKGRENVAKERAKAVIGLYLTVMYLLVKNLVNVNARYVIAIHCLERDFGLYKEIIPELASKNLKNDYRILSQTLCELCDDRDESPNLFLKKNKRLRKCVISIMQTAA

SEQ ID NO: 277 - protein, 1001 aa, Unknown
  human gut metagenome sequence
MGKKIHARDLREQRKNDRTAKFAVQNKKCEAQRAVQKKDAAVSAKSVSSVSSKKDNATKSMAKAAGVKSVFAVGNTVYMTSFGRGNDAVLEQKIVDTSHEPLNIDDPAYQLNVVTMNGYSVTGHRGETVSAVTDNPLRRFNGGKKDEPEQSVPTDMLCLKPTLEKKFFGKEFNDNIHIQLIYNILDIEKILAVYSTNAVYALNNTIADENDENWDLFANFSTDNTYYELRNAAAYKESADDESTDDEKRREAEKKKREAKKAEKILADYEKFRKNNRLAYFADAFYVDKNKSKSKSKDKAEGIQRGKKEIYSILALIAKLRHWCVHSEDGRAEFWLYKLDELKDDFKNVLDVVYNRPVEEINNRFIENNKVNIQILDSVYENTDIAELTRSYYEFLITKKYKNMGFSIKKLRESMLEGKGYADKEYDSVRNKLYQMTDFILYTGYINEDSDRADDLVNTLRSSLKEDDKTTVYCKEADYLWKKYRESIREVADALDGDNIKKLSKSNIEIQEDKLRKCFISYADSVSEFTKLIYLLTRFLSGKEINDLVTTLINKFDNIRSFLEIMDELGLDRTFTAEYSFFEGSTKYLAELVELNSFVKSCSFDMSAKRTMYRDALDILGIESDKTEEDIEKMIDNILQVDANGKKLPNKNHGLRNFIASNVIDSNRFEYLVRYGNPKKIRETAKCEPAVRFVLNEIPDAQIERYYKAYYPDEKSLCLANMQRDKLADMIAEIKFENFSDAGSYQEANATSTRITSEAEIKRKNQAIIRLYLTVMYIMLKNLVNVNARYVIAFHCLERDAKLYSESVLKVGNTNEESRLQTGNTNEEKNKVKLTNLTNLTMAVMGVKLENGTIKTEFDKSLAENAANRYLRNARWYKLILDNLKKSERAVVTEFRNTVCHLNAIRNININIKEVKEVENYFALYHYLIQKHLEKRFADKKVERDTGDFISKLEEHKTYCKDFVKAYCTPFGYNLVRYKNLTIDGLFDKNYPGKDDSDEQK

SEQ ID NO: 278 - protein, 921 aa, Unknown
  human gut metagenome sequence
MAKKNKMKPRERREAQKKARQLKAAEINNNAVPAIAAMPAAEAAAPAAEKKKSSVKAAGMKSILVSENKMYITSFGKGNSAVLEYEVDNNDYNKTQLSSKDNSNIELCDVDEVNITFSSKHGFESGVKINTSNPTHRSGESSSVRGDMLGLKSELEKRFFGKTFDDNIHIQLIYNILDIEKILAVYVTNIVYALNNMLGLENESNNDFMGYLSAKNTYDVFTDPDESDLSKNIKGNIKKSLSKFNDLLKTKRLGYFGLEEPKTKDKRVSEAYKKRVYHMLAIVGQIRQSVFHDKSNELDEYLYSFIDIIDSEYRETLDYLIDERFDSINKGFIQGNKVNISLLIDMMKGYEADDIIRLYYDFIVLKSQKNLGFSIKKLREKMLEEYGYRFKDKQYDSVRSKMYKLMDFLLFCNYYRNDVVAGEALVRKLRFSMTDDEKEGIYADEAAKLWGKFRNDFENIADHMNGDVIKELGKADMDFDEKILDSEKKNASDLLYFSKMIYMLTYFLDGKEINDLLTTLISKFDNIKEFLKIMKSSAVNVECELTAGYKLFNDSQRITNELFIVKNIASMRKPAASAKLTMFRDALTILGIDDKITDDRISEILKLKEKGKGIHGLRNFITNNVIESSRFVYLIKYANAQKIREVAKNEKVVMFVLGGIPDTQIERYYKSCVEFPDMNSSLEVKRSELARMIKNISFDDFKNVKQQAKGRENVAKERAKAVIGLYLTVMYLLVKNLVNVNARYVIAIHCLERDFGLYKEIIPELASKNLKNDYRILSQTLCELCDNRDESPNLFLKKNKRLRKCVEVDINNADSSMTRKYRNCIAHLTVVRELKEYIGDIRTVDSYFSIYHYVMQRCITKREDDKKQEEKIKFEDDLLKNHGYTKDFVKALNSPFGYNIPRFKNLSIEQLFDRNEYLTEK

SEQ ID NO: 279 - protein, 954 aa, Unknown
  human gut metagenome sequence
MGKKIHARDLRERRKTDRTEKFADQNKKREAERAVQKKDAAVSVKSVSSVSSKKDNVTKSMAKAAGVKSVFAVGNTVYMTSFGRGNDAVLEQKIVDTSHEPLNIDDPAYQLNVVTMNGYSVTGHRGETVSAVTDNPLRRFNGGKKDEPEQSVPTDMLCLKPTLEKKFFGKEFDDNIHIQLIYNILDIEKILAVYSTNAIYALNNMSADENIESSDFFMKRTTDETFDDFEKKKESTNSREKADFDAFEKFIGNYRLAYFADAFYVNKKNPKGKARNVLREDKELYSVLTLIGKLRHWCVHSEEGRAEFWLYKLDELKDDFKNVLDVVYNRPVEEINNRFIENNKVNIQILGSVYKNTDIAELVRSYYEFLITKKYKNMGFSIKKLRESMLEGKGYADKEYDSVRNKLYQMTDFILYTGYINEDSDRADDLVNTLRSSLKEDDKTTVYCKEADYLWKKYRESIREVADALDGDNIKRLSKSNIEIQEDKLRKCFISYADSVSEFTKLIYLLTRFLSGKEINDLVTTLINKFDNIRSFLEIMDELGLDRTFTAEYSFFEGSTKYLAELVELNSFVKSCSFDINAKRTMYRDALDILGIKSGKTEEDIEKMIDNILQIDANGDKKLKKNNGLRNFIASNVIDSNRFKYLVRYGNPKKIRETAKCKPAVRFVLNEIPDAQIERYYEACCPKNTALCSANKRREKLADMIAEIEFENFSDAGNYQKANVTSRTSEAEIKRKNQAIIRLYLTVMYIMLKNLVNVNARYVIAFHCVERDTKLYAESGLEVGNIEKNKTNLTMAVMGVKIENGIIKTEFDKSLAENAANRYLRNARWYKLILDNLKKSERAVVNEFRNTVCHLNAIRNININIDGIKEVENYFALYHYLIQKHLENRFADKKVERDTGDFISKLEEHKTYCKDFVKAYCTPFGYNLVRYKNLTIDGLFDKNYPGKDDSDKQK

SEQ ID NO: 280 - protein, 923 aa, Unknown
  human gut metagenome sequence
MAKKNKMKPRELREAQKKARQLKAVEINNNAVPEIAAMPAAEVIAPVAEKKKSSVKAAGMKSILVSENKMYITSFGKGNSAVLEYEVDNNDYNKTQLSSKNSSNIELRGVNEVNITFSSKHGFESGVEINTSNPTHRSGESSPVRWDMLGLKSELEKRFFGKTFDDNIHIQLIYNILDIEKILAVYVTNIVYALNNMLGIKGSESYDDFMGYLSARNTYEVFTHPDKSSLSDDKKANVRKSLSKFNVLLKTKRLGYFGLEEPKTKDTRVSQAYKKRVYHMLAIVGQIRQSVFHDKSSKLHEDLYSFIDIIDSEYRETLDYLVDERFDSINKGFIQGNKVNISLLIDMMKDDYEADDIIRLYYDFIVLKSQKNLGFSIKKLREKMLDEYGFRFKDKQYDSVRSKMYKLMDFLLFCNYYRNDVIAGEALVRKLRFSMTDDEKEGIYADEAAKLWGKFRNDFENIADHMNGDVIKELGKADMDFDEKILDSEKKNASDLLYFSKMIYMLTYFLDGKEINDLLTTLISKFDNIKEFLKIMKSSAVDVECELTAGYKLFNDSQRITNELFIVKNIASMRKPAASAKLTMFRDALTILGIDDNITDDRISEILKLKEKGKGIHGLRNFITNNVIESSRFVYLIKYANAQKIREVAKNEKVVMFVLGGIPDTQIERYYKSCVEFPDMNSSLEAKRSELARMIKNISFDDFKNVKQQAKGRENVAKERAKAVIGLYLTVMYLLVKNLVNVNARYVIAIHCLERDFGLYKEIIPELASKNLKNDYRILSQTLCELCDNGDESPNLFLKKNKRLRKCVEVDINNADSSMTRKYRNCIAHLTVVRELKEYIGDIRTVDSYFSIYHYVMQRCITKRENDTKQEDKIKYEDDLLKNHGYTKDFVKALNSPFGYNIPRFKNLSIEQLFDRNEYLTEK

SEQ ID NO: 281 - protein, 919 aa, Unknown
  human gut metagenome sequence
MAKKNKMKPRELREAQKKARQLKAAEINNNAAPAIAAMPAAEVIAPAAEKKKSSVKAAGMKSILVSKNKMYITSFGKGNSAVLEYEVDNNNYNKTQLSSKDNSNIELGDVDEVNITFSSKHGFGSGVEINTSNPTHRSGESSPVRWDMLGLKSELEKRFFGKTFDDNIHIQLIYNILDIEKILAVYVTNIVYALNNMLGIKDSESYDDFMGYLSARNTYEVFTHPDKSNLSDKVKGNIKKSFSTFNDLLKTKRLGYFGLEEPKTKDTRVSQAYKKRVYHMLAIVGQIRQSVFHDKSSKLDEDLYSFIDIIDSEYRETLDYLVDERFDSINKGFIQGNKVNISLLIDMMKGFEADDIIRLYYDFIVLKSQKNLGFSIKKLREKMLDEYGFRFKDKQYDSVRSKMYKLMDFLLFCNYYRNDVVAGEALVRKLRFSMTDDEKEGIYADEAEKLWGKFRNDFENIADHMNGDVIKELGKADMDFDEKILDSEKKNASDLLYFSQMIYMLTYFLDGKEINDLLTTLISKFDNIKEFLKIMKSSAVDVECELTAGYKLFNDSQRITNELFIVKNIASMRKPAASAKLTMFRDALTILGIDDNITDDRISEILKLKEKGKGIHGLRNFITNNVIESSRFVYLIKYANAQKIREVAKNEKVVMFVLGGIPDTQIERYYKSCVEFPDMNSSLEAKRSELARMIKNIRFDDFKNVKQQAKGRENVAKERAKAVIGLYLTVMYLLVKNLVNVNARYVIAIHCLERDFGLYKEIIPELASKNLKNDYRILSQTLCELCDKSPNLFLKKNERLRKCVEVDINNADSSMTRKYRNCIAHLTVVRELKEYIGDIRTVDSYFSIYHYVMQRCITKRENDTKQEDKIKYEDDLLKNHGYTKDFVKALNSPFGYNIPRFKNLSIEQLFDRNEYLTEK

SEQ ID NO: 282 - protein, 919 aa, Unknown
  human gut metagenome sequence
MAKKNKMKPRELREAQKKARQLKAAEINNNAAPAIAAMPAAEVIAPAAEKKKSSVKAAGMKSILVSENKMYITSFGKGNSAVLEYEVDNNDYNQTQLSSKDNSNIQLGGVNEVNITFSSKHGFESGVEINTSNPTHRSGESSPVRGDMLGLKSELEKRFFGKTFDDNIHIQLIYNILDIEKILAVYVTNIVYALNNMLGVKGSESHDDFIGYLSTNNIYDVFIDPDNSSLSDDKKANVRKSLSKFNALLKTKRLGYFGLEEPKTKDNRVSQAYKKRVYHMLAIVGQIRQCVFHDKSGAKRFDLYSFINNIDPEYRDTLDYLVEERLKSINKDFIEDNKVNISLLIDMMKGYEADDIIRLYYDFIVLKSQKNLGFSIKKLRDKMLDEYGFRFKDKQYDSVRSKMYKLMDFLLFCNYYRNDIAAGESLVRKLRFSMTDDEKEGIYADEAAKLWGKFRNDFENIADHMNGDVIKELGKADMDFDEKILDSEKKNASDLLYFSKMIYMLTYFLDGKEINDLLTTLISKFDNIKEFLKIMKSSAVDVECELTAGYKLFNDSQRITNELFIVKNIASMRKPAASAKLTMFRDALTILGIDDKITDDRISGILKLKEKGKGIHGLRNFITNNVIESSRFVYLIKYANAQKIREVAKNEKVVMFVLGGIPDTQIERYYKSCVEFPDMNSSLGVKRSELARMIKNISFDDFKNVKQQAKGRENVAKERAKAVIGLYLTVMYLLVKNLVNVNARYVIAIHCLERDFGLYKEIIPELASKNLKNDYRILSQTLCELCDKSPNLFLKKNERLRKCVEVDINNADSSMTRKYRNCIAHLTVVRELKEYIGDICTVDSYFSIYHYVMQRCITKRENDTKQEEKIKYEDDLLKNHGYTKDFVKALNSPFGYNIPRFKNLSIEQLFDRNEYLTEK

SEQ ID NO: 283 - protein, 922 aa, Unknown
  human gut metagenome sequence
MAKKNKMKPRELREAQKKARQLKAAEINNNAAPAIAAMPAAEVIAPAAEKKKSSVKAAGMKSILVSENKMYITSFGKGNSAVLEYEVDNNDYNKTQLSSKDNSNIELGDVNEVNITFSSKHGFGSGMKINTSNPTHRSGESSPVRWDMLGLKSELEKRFFGKTFDDNIHIQLIYNILDIEKILAVYVTNIVYALNNMLGVKGSESHDDFIGYLSTNNIYDVFIDPDNSSLSDDKKANVRKSLSKFNVLLKTKRLGYFGLEEPKTKDNRVSEAYKKRVYHMLAIVGQIRQCVFHDKSGAKRFDLYSFINNIDPEYRDTLDYLVEERLKSINKDFIQGNKVNISLLIDMMKGYEADDIIRLYYDFIVLKSQKNLGFSIKKLREKMLEEYGFRFKDKQYDSVRSKMYKLMDFLLFCNYYRNDVVAGEALVRKLRFSMTDDEKEGIYADEAAKLWGKFRNDFENIADHMNGDVIKELGKADMDFDEKILDSEKKNASDLLYFSKMIYMLTYFLDGKEINDLLTTLISKFDNIKEFLKIMKSSAVDVECELTAGYKLFNDSQRITNELFIVKNIASMRKPAASAKLTMFRDALTILGIDDNITDDRISEILKLKEKGKGIHGLRNFITNNVIESSRFVYLIKYANAQKIREVAKNEKVVMFVLGGIPDTQIERYYKSCVEFPDMNSSLEAKRSELARMIKNISFDDFKNVKQQAKGRENVAKERAKAVIGLYLTVMYLLVKNLVNVNARYVIAIHCLERDFGLYKEIIPELASKNLKNDYRILSQTLCELCDDRDESPNLFLKKNKRLRKCVEVDINNADSSMTRKYRNCIAHLTVVRELKEYIGDIRTVDSYFSIYHYVMQRCITKREDDTKQEDKIKYEDDLLKNHGYTKDFVKALNSPFGYNIPRFKNLSIEQLFDRNEYLTEK

SEQ ID NO: 284 - protein, 925 aa, Unknown
  human gut metagenome sequence
MAKKNKMKPRELREAQKKARQLKAAEINNNAAPAIAAMPAAQVIAPAAEKKKSSVKAAGMKSILVSENKMYITSFGKGNSAVLEYEVDKVDNNNYNKTQLSSKDNSNIELGDVNEVNITFSSKHGFGSGVEINTSNPTHRSGESSPVRWDMLGLKSELEKRFFGKTFDDNIHIQLIYNILDIEKILAVYVTNIVYALNNMLGEGDDESHDDFMGYLSAQNTYYIFTHPDKSNLSDKVKGNIKKSLSKFNDLLKTKRLGYFGLEEPKTKDKRVSEAYKKRVYHMLAIVGQIRQSVFHDKSNELDEYLYSFIDIIDSEYRDTLDYLVDERFDSINKGFVQGNKVNISLLIDMMKGYEADDIIRLYYDFIVLKSQKNLGFSIKKLREKMLDEYGFRFKDKQYDSVRSKMYKLMDFLLFCNYYRNDVVAGEVLVRKLRFSMTDDEKEWIYADEAEKLWGKFRNDFENIADHMNGDVIKELGKADMDFDEKILDSEKKNASDLLYFSKMIYMLTYFLDGKEINDLLTTLISKFDNIKEFLKIMKSSAVDVECELTAGYKLFNDSQRITNELFIVKNIASMRKPAASAKLTMFRDALTILGIDDKITDDRISEILKLKEKGKGIHGLRNFITNNVIESSRFVYLIKYANAQKIREVAENEKVVMFVLGGIPDTQIERYYKSCVEFPDMNSSLEVKRSELARMIKNISFDDFKNVKQQAKGRENVAKERAKAVIGLYLTVMYLLVKNLVNVNARYVIAIHCLERDFGLYKEIIPELASKNLKNDYRILSQTLCELCDDRDESPNLFLKKNKRLRKCVEVDINNADSSMTRKYRNCIAHLTVVRELKEYIGDIRTVDSYFSIYHYVMQRCITKREDDKKQEEKIKYEDDLLKNHGYTKDFVKALNSPFGYNIPRFKNLSIEQLFDRNEYLTEK

SEQ ID NO: 285 - protein, 933 aa, Unknown
  human gut metagenome sequence
MERQKRKMKSKSKMAGVKSVFVIGDELLMTSFGDGDDAVLEKDIDENGVVNDCRNPAAYDAVYGTDSIRVKKTNNNIRAKVNNPLAKSNIRSEESALFRTRVNEYKREQKDKYETLFFGKTFDDNIHIQLISKILDIEKTFSVVIGNIVYAINNLSLEQSIDRPIDIFGDKNTQGISLREDNDYLKTMLPRCEYLFHNILNSDSDNNSKMNYNKVNKGKEEKDNRNNENIEKLKKALEVIKIIRVDSFHGVDGIKGDQKFPRSKYNLAVNYNEEIQKTISEPFNRKVEEVQQDFYRNSCVNIDFLKEIMYGSNYTDRGSDSLECSYFNFAILKQNKNMGFSITSIRECLLDLYELNFESMQNLRPRANSFCDFLIYDYYCKNESERANLVDCLRSAASEEEKKNIYFQTAERVKEKFRNAFNRISRFDASYIKNSREKNLSGGSSLPKYSFIEGFTKRSKKINDNDEKNADLFCNMLYYLAQFLDGKEINIFLTSIHNIFQNIDSFLKVMKEKGMECKFQKDFKMFSHAGHVAKKIEIVISLAKMKKTLDFYNAQALKDAVTILGVSKKHQYLDMNSYLDFYMFDNRSGATGKNAGKDHNLRNFLVSNVIRSRKFNYLSRYSNLAEVKKLAQNPSLVQFVLSRIEPSLICRYYESSQGISSEGITIDEQIKKLTGIIVDMNIDSFENINNGEIGMRYSKATPQSIERRNQMRVCVGLYLNVLYQIEKNLMNVNARYVLAFAFAERDALMLNFTLEECKKNKKRSSGGFSFIEMTQFFIDKKLFKVATEAIKKNVLKYNGNPESLNHIPGEYICKNMEGYHENTVRNFRNMVAHLTAVARVPLYISEVTQIDSYYALYHYCMQMNILQGIEQSGKILDNIKLKNALENARVHRTYSKDAVKYLCLPFAYNISRYKALTIKDLFDWTEYSCKKDE

SEQ ID NO: 286 - protein, 929 aa, Unknown
  human gut metagenome sequence
MAKKNKMKPRELREAQKKARQLKAAEINNNAAPAIAAMPAAEVIAPAAEKKKSSVKAAGMKSILVSENKMYITSFGKGNSAVLEYEVDNNDYNQTQLSSKDNSNIQLGGVNEVNITFSSKHGFESGVEINTSNPTHRSGESSPVRWDMLGLKSELEKRFFGKTFDDNIHIQLIYNILDIEKILAVYVTNIVYALNNMLGIKDSESYDDFMGYLSARNTYEVFTHPDKSNLSDKVKGNINKVKCNIKKSFSTFNDLLKTKRLGYFGLEEPKTKDTRVSQAYKKRVYHMLAIVGQIRQCVFHDKSSKLDEDLYSFIDIIDSEYRETLDYLVDERFDSINKGFIQGNKVNISLLIDMMKGYEADDIIRLYYDFIVLKSQKNLGFSIKKLREKMLDEYGFRFKDKQYDSVRSKMYKLMDFLLFCNYYRNDVVAGEALVRKLRFSMTDDEKEGIYADEAAKLWGKFRNDFENIADHMNGDVIKELGKADMDFDEKILDSEKKNASDLLYFSKMIYMLTYFLDGKEINDLLTTLISKFDNIKEFLKIMKSSAVDVECELTAGYKLFNDSQRITNELFIVKNIASMRKPAASAKLTMFRDALTILGIDDNITDDRISEILKLKEKGKGIHGLRNFITNNVIESSRFVYLIKYANAQKIREVAKNEKVVMFVLGGIPDTQIERYYKSCVEFPDMNSSLEAKRSELARMIKNISFDDFKNVKQQAKGRENVAKERAKAVIGLYLTVMYLLVKNLVNVNARYVIAIHCLERDFGLYKEIIPELASKNLKNDYRILSQTLCELCDDRDESPNLFLKKNKRLRKCVEVDINNADSSMTRKYRNCIAHLTVVRELKEYIGDIRTVDSYFSIYHYVMQRCITKREDDKKQEEKIKYEDDLLKNHGYTKDFVKALNSPFGYNIPRFKNLSIEQLFDRNEYLTEK

SEQ ID NO: 287 - protein, 955 aa, Unknown
  human gut metagenome sequence
MAKKKRITAKERKQNHRESLMKKADSNAEKEKAKKPVVENKPDTAISKDNTPKPNKEIKKSKAKLAGVKWVIKANNDVAYISSFGKGNNSVLEKRIMGDVSSNVNKDSHMYVNPKYTKKNYEIKNGFSSGSSLVTYPNKPDKNSGMDALCLKPYFEKDFFGHIFTDNMHIQAIYNIFDIEKILAKHITNIIYTVNSFDRNYNQSGNDTIGFDINYRIPYLKYGGGKDSKGNPKNKSKWKKRENFINFYNEAKPHLGYYENIFYDHGEPISEEKFYNYLNILNFIRNNTFHYKDNDIELYSENYSEEYVFINCLNEFVKNKFKNVNKNFISNEKNNLYIILNAYGEDTENVEVVKKYSKELYKLSVLKTNKNLGVNVKKLRESAIENGYCPLPYDKENDVAKLSSVKHKLYKTYDFVITHYLNSNDKPLLEIVEALRLSKNDDEKEIVYKKYAEKLFKADDVINPIKAISKLFVEKGNKLFREKVRINKEYIEDVSIDKNIYDFTKVIFFMTCFLDGKEINDLLTNIISKLQIIEDHNNVIKFIAENDDAVYKDYSDKYAIFRNAGKIATELEAIKSIARMENKIENAPNEPLLKDALLSLGVSDDTKVLENTYKKYFDSKEKTDKQSQKVSTFLMNNVINNNRFKYVIKYINPADINGLAKNRYLVKFVLSKIPEEQIDSYYKLFSNEEEPSCEEKIKLLTKKISKLNFQTLFENYKIPNVEKEKKKAIITLYFTIVYILVKNLVNINGLYTLALYFVERDGFFYKDICEKKDKKQLYKDDDYLLLPEIFSGSKYREETKNLKLPKEKDRDIMKKYLPNDEDRKEYNKFFKQYRNNIVHLNIIAKLSELTKNIDKDINSYFDIYHYCTQRVMFDYCKKNNNVVLAKMKDLAHIKSDCDEFSSKHTYPYSSAVLRFMNLPFAYNVPRFKNLSYKKFFDKQWLNHYENLNDFIRILY

SEQ ID NO: 288 - protein, 939 aa, Unknown
  human gut metagenome sequence
MAKKKRITAKERKQNHRESLMKKADSNAEKEKAKKPVVENKPDTAISKDNTPKPNKEIKKSKAKLAGVKWVIKANNDVAYISSFGKGNNSVLEKRIMGDVSSNVNKDSHMYVNPKYTKKNYEIKNGFSSGSSLVTYPNKPDKNSGMDALCLKPYFEKDFFGHIFTDNMHIQAIYNIFDIEKILAKHITNIIYTVNSFDRNYNQSGNDTIGFDINYRIPYLKYGGGKDSKGNPKNKSKWKKRENFINFYNEAKPHLGYYENIFYDHGEPISEEKFYNYLNILNFIRNNTFHYKDNDIELYSENYSEEYVFINCLNEFVKNKFKNVNKNFISNEKNNLYIILNAYGEDTENVEVVKKYSKELYKLSVLKTNKNLGVNVKKLRESAIENGYCPLPYDKENDVAKLSSVKHKLYKTYDFVITHYLNSNDKPLLEIVEALRLSKNDDEKEIVYKKYAEKLFKADDVINPIKAISKLFVEKGNKLFREKVRINKEYIEDVSIDKNIYDFTKVIFFMTCFLDGKEINDLLTNIISKLQIIEDHNNVIKFIAENDDAVYKDYSDKYAIFRNAGKIATELEAIKSIARMENKIENAPNEPLLKDALLSLGVSDDTKVLENTYKKYFDSKEKTDKQSQKVSTFLMNNVINNNRFKYVIKYINPADINGLAKNRYLVKFVLSKIPEEQIDSYYKLFSNEEEPSCEEKIKLLTKKISKLNFQTLFENYKIPNVEKEKKKAIITLYFTIVYILVKNLVNINGLYTLALYFVERDGFFYKDICEKKDKKQLYKDDDYLLLPEIFSGSKYREETKNLKLPKEKDRDIMKKYLPNDEDRKEYNKFFKQYRNNIVHLNIIAKLSELTKNIDKDINSYFDIYHYCTQRVMFDYCKKNNNVVLAKMKDLAHIKSDCDEFSSKHTYPYSSAVLRFMNLPFAYNVPRFKNLSYKKFFDKQ

SEQ ID NO: 289 - protein, 921 aa, Unknown
  human gut metagenome sequence
MAKKNKMKPRELREAQKKARQLKAAEINNNAAPAIAAMPAAQVIAPAAEKKKSSVKAAGMKSILVSENKMYITSFGKGNSAVLEYEVDKVDNNNYNKTQLSSKDNSNIELCDVGKVNITFSSRRGFESGVEINTSNPTHRSGESSSVRGDMLGLKSELEKRFFGKNFDDNIHIQLIYNILDIEKILAVYVTNIVYALNNMLGEGDESNYDFMGYLSTFNTYKVFTNPNGSTLSDDKKENIRKSLSKFNALLKTKRLGYFGLEEPKTKDTRASEAYKKRVYHMLAIVGQIRQCVFHDKSGAKRFDLYSFINNIDPEYRETLDYLVDERFDSINKGFIQGNKVNISLLIDMMKGYEADDIIRLYYDFIVLKSQKNLGFSIKKLREKMLEEYGYRFKDKQYDSVRSKMYKLMDFLLFCNYYRNDVVAGEALVRKLRFSMTDDEKEGIYADEASKLWGKFRNDFENIADHMNGDVIKELGKADMDFDEKILDSEKKNASDLLYFSKMIYMLTYFLDGKEINDLLTTLISKFDNIKEFLKIMKSSAVDVECELTAGYKLFNDSQRITNELFIVKNIASMRKPASSAKLTMFRDALTILGIDDNITDDRISEILKLKEKGKGIHGLRNFITNNVIESSRFVYLIKYANAQKIRKVAKNEKVVMFVLGGIPDTQIERYYKSCVEFPDMNSSLEVKRSELARMIKNISFDDFKNVKQQAKGRENVAKERAKAVIGLYLTVMYLLVKNLVNVNARYVIAIHCLERDFGLYKEIIPELASKNLKNDYRILSQTLCELCDESPNLFLKKNERLRKCVEVDINNADSSMTRKYRNCIAHLTVVRELKEYIGDIRTVDSYFSIYHYVMQRCITKREDDKKQEEKIKFEDDLLKNHGYTKDFVKALNSPFGYNIPRFKNLSIEQLFDRNEYLTEK

SEQ ID NO: 290 - protein, 945 aa, Unknown
  human gut metagenome sequence
MAKKKRMTAKERKQNHRESLMKKADSNAEKEKAKKPVVENKPDTAISKDNKPKPNKEIKKSKAKLAGVKWIIKANDDVTYISSFGKGNNSVLEKRIIGDVSGDVNKDSHMYVNPKYTKKNYEIKNGFSSGSSLVTYPNKPDKNSGMDALCLKPYFEIDFFGHIFTDNMHIQAIYNIFDIEKILAKHITNIIYTVNSFDRNYNQSGNDTIGFDLNYRVPYLEYGGGKDSNGKPNKISAWKKRENFINFYNEAKPHLGYYENIFYDHGEPISEEKFYNYLNILNFIRNNTFHYKDNDIELYSENYSEEYVFINCLNEFVKNKFKNVNKNFISNEKNNLYIILKAYGEDTENVEVVKKYSKELYKLSVLKTNKNLGVNVKKLRESAIEYGYCPLPYDKEKEVAKLSSVKHKLYKTYDFVITHYLNSNDKLLLEIVETLRLSKNDDEKENVYKKYAEKLFKADDVINPIKAISKLFAEKGNKLFKEKIIIKKEYIEDVSIDKNIYDFTKVIFFMTCFLDGKEINDLLTNIISKLQVIEDHNNVIKFIFHNKDAVYKDYSDKYAIFRNAGKIATELEAIKSIARMENKIENAPKEPLLKDALLALGVSSNDFDEKYEKYFKTDVDADKDHQKVSTFLMNNVINNSRFKYVVKYINPADINGLAKNRYLVKFVLSKIPEEQIDSYYKLFSNEEEPSCEEKIKLLTKKISKLNFQTLFENNKIPNVEKERKKAIITLYFTIVYILVKNLVNINGLYTLALYFVERDGFFYKQICEKKLIETLKKKDKKQLYNDDDYLLLPEIFSGSKYREETKNLKLPKEKDRDIMKKYLPNDKDREEYNKFFKQYRNNIVHLKIIAKLSELTKNIDKDINSYFDIYHYCTQRVMFDYCKKNNNVVLAKMKDLAHIKSDCDEFSSKHTYPYSSAVLRFMNLPFAYNVPRFKNLSYKKFFDKQ

SEQ ID NO: 291 - protein, 963 aa, Unknown
  human gut metagenome sequence
MAKKKRMTAKERKQNHRDSLMKKADSNAEKEKAKKPVVENKPDTAISKDNKPKPNKEIKKSKAKLAGVKWIIKANDDVAYISSFGKGNNSVLEKRIMGDVSSNVNKDSHMYVNPKYTKKNYEIKNGFSSGSSLVTYPNKPDKNSGMDALCLKPYFEKDFFGHIFTDNMHIQAIYNIFDIEKILAKHITNIIYTVNSLDRSYNQSGNDTIGFDLNYCIPYSEYGGGKDSNGKPNKISAWKKRENFIKFYNEAKPHLGYYENIFYDHGEPISEEKFYNYLNILNFIRNNTFHYKDNDIELYSENYSEEYVFINCLNEFVKNKFKNVNKNFISNEKNNLYIILNAYGEDTENVEVVKKYSKELYKLSVLKTNKNLGVNVKKLRESAIENGYCPLPYDKENDVAKLSSVKHKLYKTYDFVITHYLNSNDKPLLEIVEALRLSKNDDEKEIVYKKYAEKLFKADDVINPIKAISKLFVEKGNKLFREKVRINKEYIEDVSIDKNIYDFTKVIFFMTCFLDGKEINDLLTNIISKLQIIEDHNNVIKFIAENDDAVYKDYSDKYAIFRNAGKIATELEAIKSIARMENKIENAPNEPLLKDALLSLGVSDDTKVLENTYKKYFDSKEKADKQSQKVSTFLMNNVINNNRFKYVIKYINPADINGLAKNRYLVKFVLSKIPEEQIDSYYKLFSNEEEHSCEEKIKLLTKKISKLNFQTLFENNKIPNVEKERKKAIITLYFTIVYILVKNLVNINGLYTLALYFVERDGFFYKQICEKKLIETLKKKDKKQLYKDDDYLLLPEIFSGSKYREETKNLKLPKEKDRDIMKKYLPNDKDREDYNDFFTAYRNNIVHLNIIAKLSKLTKNIDKDINSYFDIYHYCTQRVMFDYCKKNNNVVLAKMKDLAHIKSDCDEFSSKHTYPYSSAVLRFMNLPFAYNVPRFKNLSYKKFFDKQWLNHYENLNDFIRILY

SEQ ID NO: 292 - protein, 947 aa, Unknown
  human gut metagenome sequence
MAKKKRMTAKERKQNHRDSLMKKADSNAEKEKAKKPVVENKPDTAISKDNKPKPNKEIKKSKAKLAGVKWIIKANDDVAYISSFGKGNNSVLEKRIMGDVSSNVNKDSHMYVNPKYTKKNYEIKNGFSSGSSLVTYPNKPDKNSGMDALCLKPYFEKDFFGHIFTDNMHIQAIYNIFDIEKILAKHITNIIYTVNSLDRSYNQSGNDTIGFDLNYCIPYSEYGGGKDSNGKPNKISAWKKRENFIKFYNEAKPHLGYYENIFYDHGEPISEEKFYNYLNILNFIRNNTFHYKDNDIELYSENYSEEYVFINCLNEFVKNKFKNVNKNFISNEKNNLYIILNAYGEDTENVEVVKKYSKELYKLSVLKTNKNLGVNVKKLRESAIENGYCPLPYDKENDVAKLSSVKHKLYKTYDFVITHYLNSNDKPLLEIVEALRLSKNDDEKEIVYKKYAEKLFKADDVINPIKAISKLFVEKGNKLFREKVRINKEYIEDVSIDKNIYDFTKVIFFMTCFLDGKEINDLLTNIISKLQIIEDHNNVIKFIAENDDAVYKDYSDKYAIFRNAGKIATELEAIKSIARMENKIENAPNEPLLKDALLSLGVSDDTKVLENTYKKYFDSKEKADKQSQKVSTFLMNNVINNNRFKYVIKYINPADINGLAKNRYLVKFVLSKIPEEQIDSYYKLFSNEEEHSCEEKIKLLTKKISKLNFQTLFENNKIPNVEKERKKAIITLYFTIVYILVKNLVNINGLYTLALYFVERDGFFYKQICEKKLIETLKKKDKKQLYKDDDYLLLPEIFSGSKYREETKNLKLPKEKDRDIMKKYLPNDKDREDYNDFFTAYRNNIVHLNIIAKLSKLTKNIDKDINSYFDIYHYCTQRVMFDYCKKNNNVVLAKMKDLAHIKSDCDEFSSKHTYPYSSAVLRFMNLPFAYNVPRFKNLSYKKFFDKQ

SEQ ID NO: 293 - protein, 929 aa, Unknown
  human gut metagenome sequence
MAKKNKMKPRELREAQKKARQLKAAEINNNAAPAIAAMPAAQVIAPAAEKKKSSVKAAGMKSILVSENKMYITSFGKGNSAVLEYEVDKVDNNNYNKTQLSSKDNSNIELGDVNEVNITFSSKHGFESGVEINTSNPTHRSGESSPVRWDMLGLKSELEKRFFGKTFDDNIHIQLIYNILDIEKILAVYVTNIVYALNNMLGIKGSESYDDFMGYLSARNTYEVFTHPDKSNLSDKVKGNIKKSFSTFNDLLKTKRLGYFGLEEPKTKDTRVSEAYKKRVYHMLAIVGQIRQCVFHDLSEHSEYDLYSFIDNSKKVYRECRETLNYLVDERFDSINKGFIQGNKVNISLLIDMMKDDYEADDIIHLYYDFIVLKSQKNLGFSIKKLREKMLDEYGFRFKDKQYDSVRSKMYKLMDFLLFCNYYRNDVVAGEALVRKLRFSMTDDEKEGIYADEAEKLWGKFRNDFENIADHMNGDVIKELGKADMDFDEKILDSEKKNASDLLYFSKMIYMLTYFLDGKEINDLLTTLISKFDNIKEFLKIMKSSAVDVECELTAGYKLFNDSQRITNELFIVKNIASMRKPAASAKLTMFRDALTILGIDDKITDDRISEILKLKEKGKGIHGLRNFITNNVIESSRFVYLIKYANAQKIREVAKNEKVVMFVLGGIPDTQIERYYKSCVEFPDMNSSLKVKRSELARMIKNIRFDDFKNVKQQAKGRENVAKERAKAVIGLYLTVMYLLVKNLVNVNARYVIAIHCLERDFGLYKEIIPELASKNLKNDYRILSQTLCELCDDRDESPNLFLKKNKRLRKCVEVDINNADSSMTRKYRNCIAHLTVVRELKEYIGDIRTVDSYFSIYHYVMQRCITKREDDKKQEEKIKYEDDLLKNHGYTKDFVKALNSPFGYNIPRFKNLSIEQLFDRNEYLTEK

SEQ ID NO: 294 - protein, 922 aa, Unknown
  human gut metagenome sequence
MAKKNKMKPRELREAQKKARQLKAAEINNNAAPAIAAMPAAEVIAPAAEKKKSSVKAAGMKSILVSKNKMYITSFGKGNSAVLEYEVDNNDYNKTQLSSKDNSNIELGNVNEVNITFSSRRGFESGVEINTSNPTHRSGESSSVRGDMLGLKSELEKRFFGKTFDDNIHIQLIYNILDIEKILAVYVTNIVYALNNMLGVKGSESHDDFIGYLSTNNIYDVFIDPDNSSLSDDKKANVRKSLSKFNALLKTKRLGYFGLEEPKTKDNRVSEAYKKRVYHMLAIVGQIRQCVFHDKSGAKRFDLYSFINNIDPEYRDTLDYLVEERLKSINKDFIEDNKVNISLLIDMMKGYEADDIIRLYYDFIVLKSQKNLGFSIKKLREKMLDEYGFRFKDKQYDSVRSKMYKLMDFLLFCNYYRNDVVADEALVRKLRFSMTDDEKEGIYADEAAKLWGKFRNDFENIADHMNGDVIKELGKADMDFDEKILDSEKKNASDLLYFSKMIYMLTYFLDGKEINDLLTTLISKFDNIKEFLKIMKSSAVDVECELTAGYKLFNDSQRITNELFIVKNIASMRKPAASAKLTMFRDALTILGIDDKITDDRISEILKLKEKGKGIHGLRNFITNNVIESSRFVYLIKYANAQKIREVAKNEKVVMFVLGGIPDTQIERYYKSCVEVSDMNSSLEAKRSELARMIKNIRFDDFKNVKQQANGRENVAKERAKAVIGLYLTVMYLLVKNLVNVNARYVIAIHCLERDFGLYKEIIPELASKNLKNDYRILSQTLCELCDNGDESPNLFLKKNKRLRKCVEVDINNADSSMIRKYRNCIAHLTVVRELNKYINDIYVVNSYFSICHYVMQRCITKRENDTKQEDKIKYEDDLLKNHGYTKDFVKALNSPFGYNIPRFKNLSIKQLFDRNEYLTEK

SEQ ID NO: 295 - protein, 961 aa, Unknown
  human gut metagenome sequence
MAKKKKTARQLREEMQQQRKQAIQKQQEQRQEKAAAARETAAPEQPAAAPVPKRQRKSLAKAAGLKSNFILDPQRRTTVMTAFGQGSTAILEKQIVDRAISDLQPVQQFQVEPASAAKYRLKNSRVRFPNVTADDPLYRRKDGGFVPGMDALRRKNVLEQRFFGKSFADNIHIQMIYSILDIHKILAAASGHIVHLLNIVNGSKDRDFIGMLAAHVLYNELNEEAKRSIADFCKSPRLIYYSAAFYETLDNGKSERRSNEDIFNILALMTCLRNFSSHHSIAIKVKDYSAAGLYNLRRLGPDMKKMLDTFYTEAFIQLNQSFQDHNTTNLTCLFDILNISDSARQKQLAEEFYRYVVFKEQKNLGFSVRKLREEMLLLPDAAVIADKRYDTCRSKLYNLMDFLILRVYRTGRADRCDKLPEALRAALTDEEKAVVYHKEALSLWNEMRTLILDGLLPQMTPENLSRLSGQKRKGELSLDDAMLKECLYEPGPVPEDAAPEEANAEYFCRMIYLATLFMDGKEINTLLTTLISKFENIAAFLQTMEQLNIEAELGPEYAMFTRSRAVAEQLRVINSFALMKKPQVNAKQQLYRAAVTLLGTEDPDGVTDEMLCIDPVTGKMLPPNQRHHGDTGLRNFIANNVVESRRFQYLIRYSDPAQLHQLASNKKLVRFVLSSIPDTQINRYYETCGQTRLAGRAAKVEFLTDMIAAIRFDQFRDVNQKERGANTQKERYKAMLGLYQTVLYLAVKNLVNINARYVMAFHCVERDMFLYDGELTDPKGESVSAFLAVNGKKGVQPQYLLLTQLFIRRDYLKRSACEQIQHNMENISDRLLREYRNAVAHLNVIAHLADYSADMREITSYYGLYHYLMQRHLFKRHAWQIRQPERPTEEEQKLIEQEQKQLAWEKALFDKTLQYHSYNKDLVKALNAPFGYNLARYKNLSIEPLFSKEAAPAAEIKATHA

SEQ ID NO: 296 - protein, 977 aa, Unknown
  human gut metagenome sequence
MLLSEELYKWGKAGSTMAKKKKTARQLREEMQQQRKQAIQKQQEQRQEKAAAARETAAPEQPAAAPVPKRQRKSLAKAAGLKSNFILDPQRRTTVMTAFGQGSTAILEKQIVDRAISDLQPVQQFQVEPASAAKYRLKNSRVRFPNVTADDPLYRRKDGGFVPGMDALRRKNVLEQRFFGKSFADNIHIQMIYSILDIHKILAAASGHIVHLLNIVNGSKDRDFIGMLAAHVLYNELNEEAKRSIADFCKSPRLIYYSAAFYETLDNGKSERRSNEDIFNILALMTCLRNFSSHHSIAIKVKDYSAAGLYNLRRLGPDMKKMLDTFYTEAFIQLNQSFQDHNTTNLTCLFDILNISDSARQKQLAEEFYRYVVFKEQKNLGFSVRKLREEMLLLPDAAVIADKRYDTCRSKLYNLMDFLILRVYRTGRADRCDKLPEALRAALTDEEKAVVYHKEALSLWNEMRTLILDGLLPQMTPENLSRLSGQKRKGELSLDDAMLKECLYEPGPVPEDAAPEEANAEYFCRMIYLATLFMDGKEINTLLTTLISKFENIAAFLQTMEQLNIEAELGPEYAMFTRSRAVAEQLRVINSFALMKKPQVNAKQQLYRAAVTLLGTEDPDGVTDEMLCIDPVTGKMLPPNQRHHGDTGLRNFIANNVVESRRFQYLIRYSDPAQLHQLASNKKLVRFVLSSIPDTQINRYYETCGQTRLAGRAAKVEFLTDMIAAIRFDQFRDVNQKERGANTQKERYKAMLGLYQTVLYLAVKNLVNINARYVMAFHCVERDMFLYDGELTDPKGESVSAFLAVNGKKGVQPQYLLLTQLFIRRDYLKRSACEQIQHNMENISDRLLREYRNAVAHLNVIAHLADYSADMREITSYYGLYHYLMQRHLFKRHAWQIRQPERPTEEEQKLIEQEQKQLAWEKALFDKTLQYHSYNKDLVKALNAPFGYNLARYKNLSIEPLFSKEAAPAAEIKATHA

SEQ ID NO: 297 - protein, 919 aa, Unknown
  human gut metagenome sequence
MAKKNKMKPRELREAQKKARQLKAAEINNNAVPAIAAMPAAQVIAPAAEKKKSSVKAAGMKSILVSKNKMYITSFGKGNSAVLEYEVDNNDYNKTQLSSKDNSNIELRGVTKVNITFSSKHGLESGVEINTSNPTHRSGESSPVRWDMLGLKSELEKRFFGKTFDDNIHIQLIYNILDIEKILAVYVTNIVYALNNMLGVKGSESHDDFIGYLSTNNTYDVFIDPDNSSLSDDKKANVRKSLSKFNALLKTKRLGYFGLEEPKTKDNRVSEAYKKRVYHMLAIVGQIRQCVFHDKSGAKRFDLYSFINNIDPEYRETLDYLVDERFDSINKDFIQGNKVNISLLIDMMKGYEADDIIRLYYDFIVLKSQKNLGFSIKKLREKMLDEYGFRFKDKQYDSVRSKMYKLMDFLLFCNYYRNDVVAGEALVRKLRFSMTDDEKEGIYADEAAKLWGKFRNDFENIADHMNGDVIKELGKADMDFDEKILDSEKKNASDILYFSKMIYMLTYFLDGKEINDLLTTLISKFDNIKEFLKIMKSSAVDVECELTAGYKLFNDSQRITNELFIVKNIASMRKPAASAKLTMFRDALTILGIDDNITDDRISEILKLKEKGKGIHGLRNFITNNVIESSRFVYLIKYANAQKIREVAKNEKVVMFVLGGIPDTQIERYYKSCVEFPDMNSSLEVKRSELARMIKNISFDDFKNVKQQAKGRENVAKERAKAVIGLYLTVMYLLVKNLVNVNARYVIAIHCLERDFGLYKEIIPELASKNLKNDYRILSQTLCDDRDESPNLFLKKNKRLRKCVEVDINNADSSMTRKYRNCIAHLTVVRELKEYIGDIRTVDTYFSIYHYVMQRCITKREDDTKQEEKIKYEDDLLKNHGYTKDFVKALNSPFGYNIPRFKNLSIEQLFDRNEYLTEK

SEQ ID NO: 298 - protein, 980 aa, Unknown
  human gut metagenome sequence
MMGKHLNAKQRKLEKKLKNQQKDMMYTKSTDAVSVPTLKAAPTKAEMSQDTAEASTLITPGTLKTKAKAMGLKSTLVFDDKIVVTSFLNSKTEENEKCAHIEKIADCNGQTIVERPRMFNTSINAKKVDLSKDNDETNYPNPAFEDCGRDYINVKSALEKRVFGKTYNKDNLHVQIAYNIFDIKKIIGAYINNIIYIFYNLGREEYDAKKDIIGTQDSAYISKILNNTSAYFTYFDGVFKQITDRDSNKDREIKNSYNALVLKVLYYLRQFCMHGNTYTKRNEESFLSDTALYNAKEFFAKADPQINELIDAVYADGIKTINSDFMAHAKNNMYIICEVYKNEAEDSLMKEYYDFVVRKEGNNLGFNTRQLREILIDKYVGNLRGKKYNTFRNKLYTVLGFILVKEIKRNPKIQDSFIAKLRANQNGDEGKLNIYNEFAPKIWSVVSSKLNSAITCFDEESLSKFKGYKDIDESLISRYGITVANTDTLVKILYFLCKFLDGKEINELCCAMINKFDNINDLIKTAAQCGEDIEFVKEYKLFINSNDLSDQIRIVKSISKMKPELSKIGEALILDAIDILGYKINKYKYDAAGNRLVDSNNKPVYSEEYCAFKKDFFETCELDEFGRVKYNKKGKPVINHRRRNFIINNVLSSKWFFYVAKYNRPSECQKFMKSKKLIALVLKDVPETQIARYYQSVTGGRTQANSEAMRMTLIKLLHEFSIKNVLSDVGTMTASENKRQIENSRKERMKAIVKLYLTVVYLIAKSLVKVNTRFSIAFSAYERDVSLLADENELIALANNEDDKWKKGNYVFALTKHFWDNDEPYFDKYNNALQQIRSIVDPNERRLAYRANDKVVKHTHFNLHSYKYVKHNYEEISKASKIITAYRNNVQHLNVMNSITKYLGDISEVTSYYSLYCYTLQRLLLDDNNNDKFASIKGNLRKFGIYNKDFMWLLNIPFAYNLPRYKNLSNEEIFYDELQK

SEQ ID NO: 299 - protein, 979 aa, Unknown
  human gut metagenome sequence
MGKHLNAKQRKLEKKLKNQQKDMMYTKSTDAVSVPTLKAAPTKAEMSQDTAEASTLITPGTLKTKAKAMGLKSTLVFDDKIVVTSFLNSKTEENEKCAHIEKIADCNGQTIVERPRMFNTSINAKKVDLSKDNDETNYPNPAFEDCGRDYINVKSALEKRVFGKTYNKDNLHVQIAYNIFDIKKIIGAYINNIIYIFYNLGREEYDAKKDIIGTQDSAYISKILNNTSAYFTYFDGVFKQITDRDSNKDREIKNSYNALVLKVLYYLRQFCMHGNTYTKRNEESFLSDTALYNAKEFFAKADPQINELIDAVYADGIKTINSDFMAHAKNNMYIICEVYKNEAEDSLMKEYYDFVVRKEGNNLGFNTRQLREILIDKYVGNLRGKKYNTFRNKLYTVLGFILVKEIKRNPKIQDSFIAKLRANQNGDEGKLNIYNEFAPKIWSVVSSKLNSAITCFDEESLSKFKGYKDIDESLISRYGITVANTDTLVKILYFLCKFLDGKEINELCCAMINKFDNINDLIKTAAQCGEDIEFVKEYKLFINSNDLSDQIRIVKSISKMKPELSKIGEALILDAIDILGYKINKYKYDAAGNRLVDSNNKPVYSEEYCAFKKDFFETCELDEFGRVKYNKKGKPVINHRRRNFIINNVLSSKWFFYVAKYNRPSECQKFMKSKKLIALVLKDVPETQIARYYQSVTGGRTQANSEAMRMTLIKLLHEFSIKNVLSDVGTMTASENKRQIENSRKERMKAIVKLYLTVVYLIAKSLVKVNTRFSIAFSAYERDVSLLADENELIALANNEDDKWKKGNYVFALTKHFWDNDEPYFDKYNNALQQIRSIVDPNERRLAYRANDKVVKHTHFNLHSYKYVKHNYEEISKASKIITAYRNNVQHLNVMNSITKYLGDISEVTSYYSLYCYTLQRLLLDDNNNDKFASIKGNLRKFGIYNKDFMWLLNIPFAYNLPRYKNLSNEEIFYDELQK

SEQ ID NO: 300 - protein, 920 aa, Unknown
  human gut metagenome sequence
MAKKNKMKPRELREAQKKARQLKVAEINNNAAPAIAAMPAVEVIAPAAEKKKSSVKAAGMKSILVSENKMYITSFGKGNSAVLEYEVDNNDYNKTQLSSKDNSNIELGNVNEVNITFSSRRGFESGVEINTSNPTHRSGESSSVRGDMLGLKSELEKRFFGKTFDDNIHIQLIYNILDIEKILAVYVTNIVYALNNMLGIKGSESYDDFMGYLSARNTYEVFTNPNGSTLSDDKKENIRKSLSKFNALLKTKRLGYFGLEEPKTKDTRVSQAYKKRVYHMLAIVGQIRQSVFHDKSSKLDEDLYSFIDIIDSEYRETLDYLVDERFDSINKGFIQGNKVNISLLIDMMKDDYEADDIIRLYYDFIVLKSQKNLGFSIKKLREKMLDEYGFRFKDKQYDSVRSKMYKLMDFLLFCNYYRNDVVAGEALVRKLRFSMTDDEKEGTYADEAEKLWGKFRNDFENIADHMNGDAIKELGKADMDFDEKILDSEKKNASDLLYFSKMIYMLTYFLDGKEINDLLTTLISKFDNIKEFLKIMKSSAVDVECELTAGYKLFNDSQRITNELFIVKNIASMRKPAASAKLTMFRDALTILGIDDNITDDRISEILKLKEKGKGIHGLRNFITNNVIESSRFVYLIKYANAQKIREVAKNEKVVMFVLGGIPDTQIERYYKSCVEFPDMNSSLEAKRSELARMIKNISFDDFKNVKQQAKGRENVAKERAKAVIGLYLTVMYLLVKNLVNVNARYVIAIHCLERDFGLYKEIIPELASKNLKNDYRILSQTLCELCDKSPNLFLKKNERLRKCVEVDINNADSSMTRKYRNCIAHLTVVRELKEYIGDIRTVDSYFSIYHYVMQRCITKRENDTKQEDKIKYEDDLLKNHGYTKDFVKALNSPFGYNIPRFKNLSIEQLFDRNEYLTEK

SEQ ID NO: 301 - protein, 954 aa, Unknown
  human gut metagenome sequence
MGKKIHARDLREQRKTDRTVKFADQNKKREAQRAVQKKDAAVSVKSVSSVSSKKDNATKSMAKAAGVKSVFAVENTVYMTSFGRGNDAVLEQKIVDTSHEQLNIDDPAYQLNVVTMNGYSVTGHRGETVSAVTDNPLRRFNGGKKDEPEQSVPTDMLCLKPTLEKKFFGKEFNDNIHIQLIYNILDIEKILAVYSTNAIYALNNMSADENIENSDFFMKRTTDETFDDFEKKKESTNSREKADFDAFEKFIGNYRLAYFADAFYVNKKNPKGKARNVLREDKELYSVLTLIGKLRHWCVHSEEGRAEFWLYKLDELKDDFKNVLDVVYNRPVEEINNRFIENNKVNIQILGSVYKNTDIAELVRSYYEFLITKKYKNMGFSIKKLRESMLEGKGYADKEYDSVRNKLYQMTDFILYTGYINEDSDRADDLVNTLRSSLKEDDKTTVYCKEADYLWKKYRESIREVADALDVDNIKNLSGSNIEIRDNELRKCFISYADSVSEFTKLIYLLTRFLSGKEINDLVTTLINKFDNIRSFLEIMDELGLDRTFTAEYSFFEGSTKYLAELVELNSFVKSCSFDINAKRTMYRDALDILGIESDKTEEDIEKMIDNILQIDANGDKKLKKNNGLRNFIASNVIDSNRFKYLVRYGNPKKIRETAKCEPAVRFVLNEIPDAQIERYYEACCPKNTALCSANKRREKLADMIAEIEFENFSDAGNYQKANVTSRTSEAEIKRKNQAIIRLYLTVMYIMLKNLVNVNARYVIAFHCVERDTKLYAESGLEVGNIEKNKTNLTMAVMGVKLENGIIKTEFDKSLAENAANRYLRNARWYKLILDNLKKSERAVVNEFRNTVCHLNAIRNININIDGIKEVENYFALYHYLIQKHLENRFADKKVERDTGDFISKLEEHKTYCKDFVKAYCTPFGYNLVRYKNLTIDGLFDKNSPGKDDSDEQK

SEQ ID NO: 302 - protein, 918 aa, Unknown
  human gut metagenome sequence
MAKKNKMKPRELREAQKKARQLKAAEINNNAVPAIAAMPAAEAAAPAAEKKKSSVKAAGMKSILVSENKMYITSFGKGNSAVLEYEVDNNDYNKTQLSSKDNSNIELGDVNEVNITFSSKRGNESGVEINTSNPTHRSGESSPVRWDMLGLKSELEKRFFGKTFDDNIHIQLIYNILDIEKILAVYVTNIVYALNNMLGEGDESNYDFMGYLSTFNTYKVFTNPNGSTLSDDKKENIRKSLSKFNALLKTKRLGYFGLEEPKTKDTRASEAYKKRVYHMLAIVGQIRQCVFHDKSGAKRFDLYSFINNIDPEYRETLDYLVDERFDSINKGFIQGNKVNISLLIDMMKGYEADDIIRLYYDFIVLKSQKNLGFSIKKLREKMLDEYGFRFKDKQYDSVRSKMYKLMDFLLFCNYYRNDIAAGESLVRKLRFSMTDDEKEGIYADEAAKLWGKFRNDFENIADHMNGDVIKELGKADMDFDEKILDSEKKNASDLLYFSKMIYMLTYFLDGKEINDLLTTLISKFDNIKEFLKIMKSSAVDVECELTAGYKLFNDSQRITNELFIVKNIASMRKPAASAKLTMFRDALTILGIDDKITDDRISEILKLKEKGKGIHGLRNFITNNVIESSRFVYLIKYANAQKIREVAKNEKVVMFVLGGIPDTQIERYYKSCVEFPDMNSSLGVKRSELARMIKNISFDDFKNVKQQAKGRENVAKERAKAVIGLYLTVMYLLVKNLVNVNARYVIAIHCLERDFGLYKEIIPELASKNLKNDYRILSQTLCELCDKSPNLFLKKNERLRKCVEVDINNADSSMTRKYRNCIAHLTVVRELKEYIGDIRTVDSYFSIYHYVMQRCITKREDDIKQEEKIKYEDDLLKNHGYTKDFVKALNSPFGYNIPRFKNLSIEQLFDRNEYLTEK

SEQ ID NO: 303 - protein, 920 aa, Unknown
  human gut metagenome sequence
MAKKNKMKPRELREAQKKARQLKVAEINNNAAPAIAAMPAVEVIAPAAEKKKSSVKAAGMKSILVSENKMYITSFGKGNSAVLEYEVDNNDYNKTQLSSKDNSNIELGNVNEVNITFSSRRGFESGVEINTSNPTHRSGESSSVRGDMLGLKSELEKRFFGKTFDDNIHIQLIYNILDIEKILAVYVTNIVYALNNMLGIKGSESYDDFMGYLSARNTYEVFTNPNGSTLSDDKKENIRKSLSKFNALLKTKRLGYFGLEEPKTKDTRVSQAYKKRVYHMLAIVGQIRQSVFHDKSSKLDEDLYSFIDIIDSEYRETLDYLVDERFDSINKGFVQGNKVNISLLIDMMKDDYEADDIIRLYYDFIVLKSQKNLGFSIKKLREKMLDEYGFRFKDKQYDSVRSKMYKLMDFLLFCNYYRNDVVAGEALVRKLRFSMTDDEKEGIYADEAAKLWGKFRNDFENIADHMNGDVIKELGKADMDFDEKILDSEKKNASDLLYFSKMIYMLTYFLDGKEINDLLTTLISKFDNIKEFLKIMKSSAVDVECELTAGYKLFNDSQRITNELFIVKNIASMRKPAASAKLTMFRDALTILGIDDNITDDRISEILKLKEKGKGIHGLRNFITNNVIESSRFVYLIKYANAQKIREVAKNEKVVMFVLGGIPDTQIERYYKSCVEFPDMNSSLEVKRSELARMIKNICFDDFKNVKQQAKGRENVAKERAKAVIGLYLTVMYLLVKNLVNVNARYVIAIHCLERDFGLYKEIVSELASKNLKNDYRILSQTLCELCDKSPNLFLKKNERLRKCVEVDINNADSSMTRKYRNCIAHLTVVRELKEYIGDIRAVDSYFSIYHYVMQRCITKRGNDTKQEDKIKYEDDLLKNHGYTKDFVKALNSPFGYNIPRFKNLSIEQLFDRNEYLTEK

SEQ ID NO: 304 - protein, 922 aa, Unknown
  human gut metagenome sequence
MAKKNKMKPRELREAQKKARQLKAAEINNNAAPAIAAMPAAEVIAPAAEKKKSSVKAAGMKSIFVSENKMYITSFGKGNSAVLEYEVDKVDNNVYNQTQLSSEDSSNIELCGVTKVNITFSSKHGLESGVEISTSNPTHRSGESSPVRWDMLGLKSELEKRFFGKTFDDNIHIQFIYNILDIEKILAVYVTNSVYALNNMLGVKGSESHDDFIGYLSTNNIYDVFIDPDNSSLSDDKKANVRKSLSKFNALLKTKRLGYFGLEEPKTKDTRVSEAYKKRVYHMLAIVGQIRQCVFHDKSSKLDEDLYSFIDIIDPEYRETLDYLVDERFDSINKGFIQGNKVNISLLIDMMKGYEADDIIRLYYDFIVLKSQKNLGFSIKKLREKMLDEYGFRFKDKQYDPVRSKMYKLMDFLLFCNYYRNDVVAGEALVRKLRFSMTDDEKEGIYADEAEKLWGKFRNDFENIADHMNGDVIKELGKADMDFDEKILDSEKKNASDLLYFSKMIYMLTYFLDGKEINDLLTTLISKFDNIKEFLKIMKSSAVNVECELTAGYKLFNDSQRITNELFIVKNIASMRKPAASAKLTMFRDALTILGIDDKITDDRISEILKLKEKGKGIHGLRNFITNNVIESSRFVYLIKYANAQKIRKVAENEKVVMFVLGGIPDTQIERYYKSCVEFPDMNSSLEAKRSELARMIKNISFDDFKNVKQQAKGRENVAKERAKAVIGLYLTVMYLLVKNLVNVNARYVIAIHCLERDFGLYKEIIPELASKNLKNDYRILSQTLCELCDKSPNLFLKKNERLRKCVEVDINNADSSMTRKYRNCIAHLTVVRELKEYIGDIRTVDSYFSIYHYVMQRCITKRENDTKQEDKIKYEDDLLKNHGYTKDFVKALNSPFGYNIPRFKNLSIEQLFDRNEYLTEK

SEQ ID NO: 305 - protein, 922 aa, Unknown
  human gut metagenome sequence
MAKKNKMKPRELREAQKKARQLKAAEINNNAAPAIAAMPAAEVIAPAAEKKKSSVKAAGMKSILVSENKMYITSFGKGNSAVLEYEVDNNDYNKTQLSSKDNSNIELGNVNEVNITFSSRRGFESGVEINTSNPTHRSGESSSVRGDMLGLKSELEKRFFGKTFDDNIHIQLIYNILDIEKILAVYVTNIVYALNNMLGVKGSESYDDFMGYLSAQNTYYIFTHPDKSNLSDKVKGNIKKSLSKFNDLLKTKRLGYFGLEEPKTKDTRVSQAYKKRVYHMLAIVGQIRQCVFHDKSGAKRFDIYSFINNIDPEYRETLDYLVDERFDSINKGFIQGNKVNISLLIDMMKDYEADDIIRLYYDFIVLKSQKNLGFSIKKLREKMLDEYGFRFKDKQYDSVRSKMYKLMDFLLFCNYYRNDVVAGETLVRKLRFSMTDDEKEGIYADEAAKLWGKFRNDFENIADHMNGDVIKELGKADMDFDEKILDSEKKNASDLLYFSKMIYMLTYFLDGKEINDLLTTLISKFDNIKEFLKIMKSSAVDVECELTEGYKLFNDSQRITNELFIVKNIASMRKPAASAKLTMFRDALTILGIDDKITDDRISEILKLKEKGKGIHGLRNFITNNVIESSRFVYLIKYANAQKIREVAKNEKVVMFVLGGIPDTQIERYYKSCVEFPDMNSSLEAKRSELARMIKNIRFDDFKNVKQQAKGRENVAKERAKAVIGLYLTVMYLLVKNLVNVNARYVIAIHCLERDFGLYKEIIPELASKNLKNDYRILSQTLCELCDDRDESPNLFLKKNKRLRKCVEVDINNADSSMTRKYRNCIAHLTVVRELKEYIGDIRTVDSYFSIYHYVMQRCITKREDDTKQEEKIKYEDVLLKNHGYTKDFVKALNSPFGYNIPRFKNLSIEQLFDRNEYLTEK

SEQ ID NO: 306 - protein, 906 aa, Unknown
  human gut metagenome sequence
MEREVKKPPKKSLAKAAGLKSTFVISPQEKELAMTAFGRGNDALLQKRIVDGVVRDVAGEKQQFQVQRQDESRFRLQNSRLADRTVTADDPLHRAETPRRQPLGAGMDQLRRKAILEQKYFGRTFDDNIHIQLIYNILDIHKMLAVPANHIVHTLNLLGGYGETDFVGMLPAGLPYDKLRVVKKKNGDTVDIKADIAAYAKRPQLAYLGAAFYDVTPGKSKRDAARGRVKREQDVYTILSLMSLLRQFCAHDSVRIWGQNTPAALYHLQALPQDMKDLLDDGWRRALGGVNDHFLDTNKVNLLTLFEYYGAETKQARVALTQDFYRFVVLKEQKNMGFSLRRLREELLKLPDAAYLTGQEYDSVRQKLYMLLDFLLCRLYAQERTGRCEELVSALRCALSDEEKDAVYQAEAAALWQALGDTLRRELLPLLKGKKLQDKDKKKLDELGLSRDVLDGVLFRPAQQGNRANADYFCRLMHLSTWFMDGKEINTLLTTLISKLENIDSLRNVLESMGLACSFVPAYAMFDHSRYIAGQLRVVNNIARMRKPAITAKREMYRAAVVLLGVDSPEAAAAITDDLLQIDPETGKVRPRGDSARDTGLRNFIANNVVESRRFTYLLRYMTPEQARVLAQNEKLIAFVLSTVPDTQLERYCRTCGREDITGRPAQIRYLTAQIMGVRYESFTDVEQRGRGDNPKKERYKALIDLYLTVLYLAVKNMVNCNARYVIAFYCRDRDTALYQKEVCWYDLEEDKKSGKQRQVEDYTALTRYFVSQGYLNRHACGYLRSNMNGISNSLLTAYRNAVDHLNVIPPLGSLCRDIGRVDSYFALYHYAVQRYLNGRYYRKTPREQELFAAMAQHRTWCSDLVKALNTPFGYNLARYKNLSIDGLFDREGDHVVREDGEKPAE

SEQ ID NO: 307 - protein, 922 aa, Unknown
  human gut metagenome sequence
MAKKNKMKPRELREAQKKARQLKAAEINNNAAPAIAAMPAEEVIAPAAEKKKSSVKAAGMKSILVSKNKMYITSFGKGNSAVLEYEVDKVDNDNYNKTQLSSEDSSNIELCGVTKVNITFSSKHGLESGVEISTSNPTHRSGESSPVRWDMLGLKSELEKRFFGKTFDDNIHIQFIYNILDIEKILAVYVTNIVYALNNMLGVKGSESYDDFMGYLSARNTYEVFTHPDKSNLSDKVKGNIKKSFSTFNDLLKTKRLGYFGLEEPKTKDNRVSEAYKKRVYHMLAIVGQIRQSVFHDKSSKLHEDLYSFIDIIDPEYRETLDYLVDERFDSINKGFIQGNKVNISLLIDMMKGYEADDIIRLYYDFIVLKSQKNLGFSIKKLREKMLDEYGFRFKDKQYDSVRSKMYKLMDFLLFCNYYRNDVVAGEALVRKLRFSMTDDEKEGIYADEAAKLWGKFRNDFENIADHMNGDVIKELGKADMDFDEKILDSEKKNASDLLYFSKMIYMLTYFLDGKEINDLLTTLISKFDNIKEFLKIMKSSAVDVECELTAGYKLFNDSQRITNELFIVKNIASMRKPAASAKLTMFRDALTILGIDDKITDDRISEILKLKEKGKGIHGLRNFITNNVIESSRFVYLIKYANAQKIREVAKNEKVVMFVLGGIPDTQIERYYKSCVEFPDMNSSLEAKRSELARMIKNISFDDFKNVKQQAKGRENVAKERAKAVIGLYLTVMYLLVKNLVNVNARYVIAIHCLERDFGLYKEIIPELASKNLKNDYRILSQTLCELCDKSPNLFLKKNERLRKCVEVDINNADSSMTRKYRNCIAHLTVVRELKEYIGDIRTVDSYFSIYHYVMQRCITKRENDTKQEDKIKYEDDLLKNHGYTKDFVKALNSPFGYNIPRFKNLSIEQLFDRNEYLTEK

SEQ ID NO: 308 - protein, 920 aa, Unknown
  human gut metagenome sequence
MAKKNKMKPRELREAQKKARQLKAAEINNNAVPAIAAMPAAQVIAPAAEKKKSSVKAAGMKSILVSENKMYITSFGKGNSAVLEYEVDNNDYNKTQLSSKDSSNIELRGVNEVNITFSSKHGFGSGVEINTSNPTHRSGESSPVRWDMLGLKSELEKRFFGKTFDDNIHIQLIYNILDIEKILAVYVTNIVYALNNMLGIKKSESHDDFMGYLSAKNTYDVFTNPNGSTLSDDKKKNIRKSLRKFNDLLKTKRLGYFGLEEPKTKDTRVSQAYKKRVYHMLAIVGQIRQSVFHDKSSKLHEDLYSFIDIIDSEYRETLDYLVDERFDSINKGFIQGNKVNISLLIDMMKDDYEADDIIRLYYDFIVLKSQKNLGFSIKKLREKMLDEYGFRFKDKQYDSVRSKMYKLMDFLLFCNYYRNDVIAGEALVRKLRFSMTDDEKEGIYADEAAKLWGKFRNDFENIADHMNGDVIKELGKADMDFDEKILDSEKKNASDLLYFSKMIYMLTYFLDGKEINDLLTTLISKFDNIKEFLKIMKSSAVDVECELTAGYKLFNDSQRITNELFIVKNIASMRKPAASAKLTMFRDALTILGIDDNITDDRISEILKLKEKGKGIHGLRNFITNNVIESSRFVYLIKYANAQKIREVAKNEKVVMFVLGGIPDTQIERYYKSCVEFPDMNSSLEAKRSELARMIKNISFDDFKNVKQQAKGRENVAKERAKAVIGLYLTVMYLLVKNLVNVNARYVIAIHCLERDFGLYKEIIPELASKNLKNDYRILSQTLCELCDKSPNLFLKKNRRLRKCVEVDINNADSSMTRKYRNCIAHLTVVRELKEYIGDIRTVDSYFSIYHYVMQRCITKRENDTKQEEKIKYEDDLLKNHGYTKDFVKALNSPFGYNIPRFKNLSIEQLFDRNEYLTEK

SEQ ID NO: 309 - protein, 923 aa, Unknown
  human gut metagenome sequence
MAKKNKMKPRELREAQKKARQLKVAEINNNAAPAIAAMPAAEAAAPAVEKKKSSVKAAGMKSILVSENKMYITSFGKGNSAVLEYEVDNNDYNKTQLSSKDNSNIELGDVDEVNITFSSKHGFGSGVEINTSNPTHRSGESSPVRWDMLGLKSELEKRFFGKTFDDNIHIQLIYNILDIEKILAVYVTNIVYALNNMLGIKGSESYDDFMGYLSAKNTYDVFTDPDESDLSKNIKGNIKKSLSKFNDLLKTKRLGYFGLEEPKTKDKRVSEAYKKRVYHMLAIVGQIRQSVFHDKSSKLDEDLYSFIDIIDSEYRETLDYLVNERFDSINKGFIQGNKVNISLLIDMMKGDYEADDIIRLYYDFIVLKSQKNLGFSIKKLREKMLDEYGFRFKDKQYDSVRSKMYKLMDFLLFCNYYRNDVVAGEALVRKLRFSMTDDEKEGIYADEAAKLWGKFRNDFENIADHMNSDVIKQLGKADMDFDEKILDSEKKNASDLLYFSKMIYMLTYFLDGKEINDLLTTLISKFDNIKEFLKIMKSSAVDVECELTAGYKLFNDSQRITNELFIVKNIASMRKPAASAKLTMFRDALTILGIDDKITDDRISEILKLKEKGKGIHGLRNFITNNVIESSRFVYLIKYANAQKIREVAKNEKVVMFVLGGIPDTQIERYYKSCVEFPDMNSSLEAKRSELARMIKNISFDDFKNVKQQAKGRENVAKERAKAVIGLYLTVMYLLVKNLVNVNARYVIAIHCLERDFGLYKEIIPELASKNLKNDYRILSQTLCELCDNCDESPNLFLKKNKRLRKCVEVDINNADSSMTRKYRNCIAHLTVVRELKEYIGDIRTVDSYFSIYHYVMQRCITKREDDTKQEEKIKYEDDLLKNHGYTKDFVKALNSPFGYNIPRFKNLSIEQLFDRNEYLTEK

SEQ ID NO: 310 - protein, 922 aa, Unknown
  human gut metagenome sequence
MAKKNKMKPRELREAQKKARQFKAAEINNNAAPAIAAMPAAEVIAPVAEKKKSSVKAAGMKSILVSENKMYITSFGKGNSAVLEYEVDNNDYNKTQLSSKDNSNIELGDVDEVNITFSSKHGFGSGVEINTSNPTHRSGESSPVRWDMLGLKSELEKRFFGKTFDDNIHIQLIYNILDIEKILAVYVTNIVYALNNMLGEGDDESHDDFMGYLSTFNTYKVFTNPNGSTLSDDKKENIRKSLSKFNALLKTKRLGYFGLEEPKTKDTRASEAYKKRVYHMLAIVGQIRQCVFHDKSGAKRFDLYSFINNIDPEYRDTLDYLVDERFDSINKGFIQGNKVNISLLIDMMKGYEADDIIRLYYDFIVLKSQKNLGFSIKKLREKMLEEYGYRFKDKQYDSVRSKMYKLMDFLLFCNYYRNDVVAGESLVRKLRFSMTDDEKEGIYADEAEKLWGKFRNDFENIADHMNGDVIKELGKADMDFDEKILDSEKKNASDLLYFSKMIYMLTYFLDGKEINDLLTTLISKFDNIKEFLKIMKSSAVDVECELTAGYKLFNDSQRITNELFVVKNIASMRKPAVSAKLTMFRDALTILGIDDKITDDRISEILKLKEKGKGIHGLRNFITNNVIESSRFVYLIKYANAQKIREVAKNEKVVMFVLGGIPDTQIERYYKSCVEFPDMNSSLEAKRSELARMIKNISFDDFKNVKQQAKGRENVAKERAKAVIGLYLTVMYLLVKNLVNVNARYVIAIHCLERDFGLYKEIIPELASKNLKNDYRILSQTLCELCDDRDESPNLFLKKNERLRKCVEVDINNADSSMTRKYRNCIAHLTVVRELKEYIGDIRTVDSYFSIYHYVMQRCITKRENDTKQEEKIKYEDDLLKNHGYTKDFVKALNSPFGYNIPRFKNLSIEQLFDRNEYLTEK

SEQ ID NO: 311 - protein, 925 aa, Unknown
  human gut metagenome sequence
MAKKNKMKPRELREAQKKARQLKVAEINNNAAPAIAAMPAAEVIAPAAEKKKSSVKAAGMKSILVSENKMYITSFGKGNSAVLEYEVDKVDNNNYNKTQLSSKNSSNIELCGVTKVNITFSSKHGFGSGVKINTSNPTHRSGESSPVRWDMLGLKSELEKRFFGKTFNDNIHIQLIYNILDIEKILAVYVTNIVYALNNMLGIKDSESYDDFMGYLSARNTYKVFTRPDKSNLSDKAKGNIKKSFSTFNDLLKTKRLGYFGLEEPKTKDTRVSQAYKKRVYHMLAIVGQIRQSVFHDKSSKLDEDLYSFIDIIDPEYRETLDYLVDERFDSINKGFIQGNKVNISLLIDMMKGYEADDIIRLYYDFIVLKSQKNLGFSIKKLREKMLDEYGFRFKDKQYDSVRSKMYKLMDFLLFCNYYRNDVAAGEALVRKLRFSMTDDEKEGIYADEAEKLWVKFRNDFENIADHMNGDVIKELGKADMDFDEKILDSEKKNASDLLYLSKMIYMLTYFLDGKEINDILTTLISKFDNIKEFLKIMKSSAVNVECELTAGYKLFNDSQRITNELFIVKNIASMRKPAASAKLTMFRDALTILGIDDKITDDRISEILKLKEKGKGIHGLRNFITNNVIESSRFVYLIKYANAQKIREVAKNEKVVMFVLGGIPDTQIERYYKSCVEFPDMNSSLEAKRSELARMIKNISFDDFKNVKQQAKGRENVAKERAKAVIGLYLTVMYLLVKNLVNVNARYVIAIHCLERDFGLYKEIIPELASKNLKNDYRILSQTLCELCDDRDESPNLFLKKNKRLRKCVEVDINNADSSMTRKYRNCIAHLTVVRELKEYIGDIRTVDSYFSIYHYVMQRCITKRENDTKQEDKIKYEDDLLKNHGYTKDFVKALNSPFGYNFPRFKNLSIEQLFDRNEYLTEK

SEQ ID NO: 312 - protein, 919 aa, Unknown
  human gut metagenome sequence
MAKKNKMKPRELREAQKKARQLKAAEINNNAAPAIAAMSAAEVIAPAAEKKKSSVKAAGMKSILVSENKMYITSFGKGNSAVLEYEVDNNDYNKTQLSSKDNSNIELGDVNEVNITFSSKHGFGSGVEINTSNPTHRSGESSPVRWDMLGLKSELEKRFFGKTFDDNIHIQLIYNILDIEKILAVYVTNIVYALNNMLGVKGSESYDDFMGYLSAKNTYEVFTHPDKSNLSDKVKGNIKKSFSTFNDLLKTKRLGYFGLEEPKTKDTRVSQAYKKRVYHMLAIVGQIRQSVFHDKSSKLHEDLYSFIDIIDSEYRETLDYLVEERLKSINKDFIEGNKVNISLLIDMMKGYEADDIIRLYYDFIVLKSQKNLGFSIKKLREKMLDEYGFRFKDKQYDSVRSKMYKLMDFLLFCNYYRNDVVAGETLVRKLRFSMTDDEKEGIYADEAAKLWGKFRNDFENIADHMNGDVIKELGKADMDFDEKILDSEKKNASDLLYFSKMIYMLTYFLDGKEINDLLTTLISKFDNIKEFLKIMKSSAVDVECELTAGYKLFNDSQRITNELFIVKNIASMRKPAASAKLTMFRDALTILGIDDNITDDRISEILKLKEKGKGIHGLRNFITNNVIESSRFVYLIKYANAQKIRKVAKNEKVVMFVLGGIPDTQIERYYKSCVEFPDMNSSLEVKRSELARMIKNISFDDFKNVKQQAKGRENVAKERAKAVIGLYLTVMYLLVKNLVNVNARYVIAIHCLERDFGLYKEIIPELASKNLKNDYRILSQTLCELCDKSPNLFLKKNRRLRKCVEVDINNADSSMTRKYRNCIAHLTVVRELKEYIGDIRTVDSYFSIYHYVMQRCITKREDDTKQEEKIKYEDDLLKNHGYTKDFVKALNSPFGYNIPRFKNLSIEQLFDRNEYLTEK

SEQ ID NO: 313 - protein, 919 aa, Unknown
  human gut metagenome sequence
MAKKNKMKPRELREAQKKARQLKAAEINNNAVPAIAAMPAAEAAAPAAEKKKSSVKAAGMKSILVSENKMYITSFGKGNSAVLEYEVDNNDYNKTQLSSKDNSNIELCDVNEVNITFSSKHGFESGVEINTSNPTHRSGESSPVRWDMLGLKSELEKRFFGKTFDDNIHIQLIYNILDIEKILAVYITNIVYALNNMLGVKGSESHDDFIGYLSTNNIYDVFIDPDNSSLSDDKKANVRKSLSKFNALLKTKRLGYFGLEEPKTKDNRVSEAYKKRVYHMLAIVGQIRQSVFHDKSSKLHEDLYSFIDIIDSEYRETLDYLVDERFDSINKGFIQGNKVNISLLIDMMKGYEADDIIRLYYDFIVIKSQKNLGFSIKKLREKMLDEYGFRFKDKQYDSVRSKMYKLMDFLLFCNYYRNDVVAGEALVRKLRFSMTDDEKEGIYADEAEKLWGKFRNDFENIADHMNGDVIKELGKADMDFDEKILDSEKKNASDLLYFSKMIYMLTYFLDGKEINDLLTTLISKFDNIKEFLKIMKSSAVNVECELTAGYKLFNDSQRITNELFIVKNIASMRKPAASAKLTMFRDALTILGIDDKITDDRISEILKLKEKGKGIHGLRNFITNNVIESSRFVYLIKYANAQKIREVAKNEKVVMFVLGGIPDTQIERYYKSCVEFPDMNSSLEAKRSELARMIKNISFDDFKNVKQQAKGRENVAKERAKAVIGLYLTVMYLLVKNLVNVNARYVIAIHCLERDFGLYKEIIPELASKNLKNDYRILSQTLCELCDKSPNLFLKKNKRLRKCVEVDINNADSSMTRKYRNCIAHLTVVRELKEYIGDIRTVDSYFSIYHYVMQRCITKRENDTKQEEKIKYEDDLLKNHGYTKDFVKALNSPFGYNIPRFKNLSIEQLFDRNEYLTEK

SEQ ID NO: 314 - protein, 924 aa, Unknown
  human metagenome sequence
MAKKNKMKPRELREAQKKARQFKAAEINNNAAPAIAAMPAAEVIAPVAEKKKSSVKAAGMKSILVSENKMYITSFGKGNSAVLEYEVDNNDYNKTQLSSKDNSNIELCGVNEVNITFSSKHGFESGVEINTSNPTHRSGESSPVRWDMLGLKSELEKRFFGKTFDDNIHIQLIYNILDIEKILAVYVTNIVYALNNMLGEGDESNYDFMGYLSTFNTYKVFTNPNGSTLSDDKKENIRKSLSKFNALLKTKRLGYFGLEEPKTKDTRVLEAYKKRVYHMLAIVGQIRQCVFHDLSEHSEYDLYSFIDNSKKVYRECRETLDYLVDERFDSINKGFIQGNKVNISLLIDMMKGYEADDIIRLYYDFIVLKSQKNLGFSIKKLREKILDEYGFRFKDKQYDSVRSKMYKLMDFLLFCNYYRNDIAAGESLVRKLRFSMTDDEKEGIYADEAAKLWGKFRNDFENIADHMNGDVIKELGKADMDFDEKILDSEKKNASDLLYFSKMIYMLTYFLDGKEINDLLTTLISKFDNIKEFLKIMKSSAVDVECELTAGYKLFNDSQRITNELFIVKNIASMRKPAASAKLTMFRDALTILGIDDKITDDRISEILKLKEKGKGIHGLRNFITNNVIESSRFVYLIKYANAQKIREVAKNEKVVMFVLGGIPDTQIERYYKSCVEFPDMNSSLEAKRSELARMIKNIRFDDFKNVKQQAKGRENVAKERAKAVIGLYLTVMYLLVKNLVNVNARYVIAIHCLERDFGLYKEIIPELASKNLKNDYRILSQTLCELCDNGDESPNLFLKKNKRLRKCVEVDINNADSNMTRKYRNCIAHLTVVRELKEYIGDIRTVDSYFSIYHYVMQRCITKREDDTKQEEKIKYEDDLLKNHGYTKDFVKALNSPFGYNIPRFKNLSIEQLFDRNEYLTEK

SEQ ID NO: 315 - protein, 919 aa, Unknown
  human metagenome sequence
MAKKNKMKPRELREAQKKARQLKAAEINNNAVPAIAAMPAAEVIAPAAEKKKSSVKAAGMKSILVSENKMYITSFGKGNSAVLEYEVDNNDYNQTQLSSDGSSNIELRGVNEVNITFSSKHGFESGVEINTSNPTHRSGESSPVRGDMLGLKSELEKRFFGKTFDDNIHIQLIYNILDIEKILAVYVTNIVYALNNMLGVKGSESYDDFMGYLSAQNTYYIFTHPDKSNLSDKVKGNIKKSLSKFNDLLKTKRLGYFGLEEPKTKDKRVSEAYKKRVYHMLAIVGQIRQSVFHDKSNELDEYLYSFIDIIDSEYRDTLDYLVDERFDSINKGFVQGNKVNISLLIDMMKGYEADDIIRLYYDFIVLKSQKNLGFSIKKLREKMLDEYGFRFKDKQYDSVRSKMYKLMDFLLFCNYYRNDVVAGEALVRKLRFSMTDDEKEGIYADEAEKLWGKFRNDFENIADHMNGDVIKELGKADMDFDEKILDSEKKNASDLLYFSKMIYMLTYFLDGKEINDLLTTLISKFDNIKEFLKIMKSSAVDVECELTAGYKLFNDSQRITNELFIVKNIASMRKPASSAKLTMFRDALTILGIDDNITDDRISEILKLKEKGKGIHGLRNFITNNVIESSRFVYLIKYANAQKIRKVAKNEKVVMFVLGGIPDTQIERYYKSCVEFPDMNSSLEVKRSELARMIKNISFDDFKNVKQQAKGRENVAKERAKAVIGLYLTVMYLLVKNLVNVNARYVIAIHCLERDFGLYKEIIPELASKNLKNDYRILSQTLCELCDKSPNLFLKKNRRLRKCVEVDINNADSSMTRKYRNCIAHLTVVRELKEYIGDIRTVDSYFSIYHYVMQRCITKRENDTKQEEKIKYEDDLLKNHGYTKDFVKALNSPFGYNIPRFKNLSIEQLFDRNEYLTEK

SEQ ID NO: 316 - protein, 919 aa, Unknown
  human metagenome sequence
MAKKNKMKPRELREAQKKARQLKAAEINNNAAPAIAAMSAAEVIAPAAEKKKSSVKAAGMKSILVSENKMYITSFGKGNSAVLEYEVDNNDYNKTQLSSKDNSNIELGDVNEVNITFSSKHGFGSGVEINTSNPTHRSGESSPVRWDMLGLKSELEKRFFGKTFDDNIHIQLIYNILDIEKILAVYVTNIVYALNNMLGVKGSESYDDFMGYLSAKNTYEVFTHPDKSNLSDKVKGNIKKSFSTFNDLLKTKRLGYFGLEEPKTKDTRVSQAYKKRVYHMLAIVGQIRQSVFHDKSSKLHEDLYSFIDIIDSEYRETLDYLVEERLKSINKDFIEGNKVNISLLIDMMKGYEADDIIRLYYDFIVLKSQKNLGFSIKKLREKMLDEYGFRFKDKQYDPVRSKMYKLMDFLLFCNYYRNDVVTGEALVRKLRFSMTDDEKEGIYADEASKLWGKFRNDFENIADHMNGDVIKELGKADMDFDEKILDSEKKNASDLLYFSKMIYMLTYFLDGKEINDLLTTLISKFDNIKEFLKIMKSSAVDVECELTAGYKLFNDSQRITNELFIVKNIASMRKPASSAKLTMFRDALTILGIDDNITDDRISEILKLKEKGKGIHGLRNFITNNVIESSRFVYLIKYANAQKIRKVAKNEKVVMFVLGGIPDTQIERYYKSCVEFPDMNSSLEVKRSELARMIKNISFDDFKNVKQQAKGRENVAKERAKAVIGLYLTVMYLLVKNLVNVNARYVIAIHCLERDFGLYKEIIPELASKNLKNDYMILSQTLCELCDKSPNLFLKKNERLRKCVEVDINNADSSMTRKYRNCIAHLTVVRELKEYIGDIRTVDSYFSIYHYVMQRCITKREDDTKQEEKIKYEDDLLKNHGYTKDFVKALNSSFGYNIPRFKNLSIEQLFDRNEYLTEK

SEQ ID NO: 317 - protein, 918 aa, Unknown
  human metagenome sequence
MAKKNKMKPRELREAQKKARQLKAAEINNNAAPAIAAMPAAEVIAPAAEKKKSSVKAAGMKSILVSENKMYITSFGKGNSAVLEYEVDNNDYNKTQLSSKDNSNIELCDVGKVNITFSSRRGFESGVEINTSNPTHRSGESSSVRGDMLGLKSELEKRFFGKNFDDNIHIQLIYNILDIEKILAVYVTNIVYALNNMLGEGDESNYDFMGYLSTFNTYKVFTNPNGSTLSDDKKENIRKSLSKFNALLKTKRLGYFGLEEPKTKDTRASEAYKKRVYHMLAIVGQIRQCVFHDKSGAKRFDLYSFINNIDPEYRETLDYLVDERFDSINKGFIQGNKVNISLLIDMMKGYEADDIIRLYYDFIVLKSQKNLGFSIKKLREKMLEEYGYRFKDKQYDSVRSKMYKLMDFLLFCNYYRNDVVAGEALVRKLRFSMTDDEKEGIYADEASKLWGKFRNDFENIADHMNGDVIKELGKADMDFDEKILDSEKKNASDLLYFSKMIYMLTYFLDGKEINDLLTTLISKFDNIKEFLKIMKSSAVDVECELTAGYKLFNDSQRITNELFIVKNIASMRKPASSAKLTMFRDALTILGIDDNITDDRISEILKLKEKGKGIHGLRNFITNNVIESSRFVYLIKYANAQKIRKVAKNEKVVMFVLGGIPDTQIERYYKSCVEFPDMNSSLEVKRSELARMIKNISFDDFKNVKQQAKGRENVAKERAKAVIGLYLTVMYLLVKNLVNVNARYVIAIHCLERDFGLYKEIIPELASKNLKNDYRILSQTLCELCDKSPNLFLKKNRRLRKCVEVDINNADSSMTRKYRNCIAHLTVVRELKEYIGDIRTVDSYFSIYHYVMQRCITKREDDTKQEEKIKYEDDLLKNHGYTKDFVKALNSPFGYNIPRFKNLSIEQLFDRNEYLTEK

SEQ ID NO: 318 - protein, 925 aa, Unknown
  human metagenome sequence
MAKKNKMKPRELREAQKKARQLKAAEINNNAAPAIAAMPAAQVIAPAAEKKKSSVKAAGMKSILVSENKMYITSFGKGNSAVLEYEVDKVDNNNYNKTQLSSKDNSNIELGDVNEVNITFSSKHGFESGVEINTSNPTHRSGESSPVRWDMLGLKSELEKRFFGKTFDDNIHIQLIYNILDIEKILAVYVTNIVYALNNMLGIKGSESYDDFMGYLSARNTYEVFTHPDKSNLSDKVKGNIKKSLSKFNDLLKTKRLGYFGLEEPKTKDTRVSQAYKKRVYHMLAIVGQIRQSVFHDKSSKLDEDLYSFIDIIDSEYRETLDYLVDERFDSINKGFIQGNKVNISLLIDMMKGYEADDIIRLYYDFIVLKSQKNLGFSIKKLREKMLDEYGFRFKDKQYDSVRSKMYKLMDFLLFCNYYRNDVVAGEALVRKLRFSMTDDEKEGIYADEASKLWGKFRNDFENIADHMNGDVIKELGKADMDFDEKILDSEKKNASDLLYFSKMIYMLTYFLDGKEINDLLTTLISKFDNIKEFLKIMKSSAVDVECELTAGYKLFNDSQRITNELFIVKNIASMRKPAASAKLTMFRDALTILGIDDKITDDRISEILKLKEKGKGIHGLRNFITNNVIESSRFVYLIKYANAQKIREVAKNEKVVMFVLGGIPDTQIERYYKSCVEFPDMNSSLEAKCSELARMIKNISFDDFKNVKQQAKGRENVAKERAKAVIGLYLTVMYLLVKNLVNVNARYVIAIHCLERDFGLYKEIIPELASKNLKNDYRILSQTLCELCDDRDESPNLFLKKNKRLRKCVEVDINNADSSMTRKYRNCIAHLTVVRELKEYIGDIRTVDSYFSIYHYVMQRCITKREDDKKQEEKIKYEDDLLKNHGYTKDFVKALNSPFGYNIPRFKNLSIEQLFDRNEYLTEK

SEQ ID NO: 319 - protein, 921 aa, Unknown
  human metagenome sequence
MAKKNKMKPRELREAQKKARQLKAAEINNNAAPAIAAMPAAEVIAPAAEKKKSSVKAAGMKSILVSENKMYITSFGKGNSAVLEYEVDNNDYNKTQLSSKDNSNIELCDVGKVNITFSSRRGFESGVEINTSNPTHRSGESSSVRGDMLGLKSELEKRFFGKNFDDNIHIQLIYNILDIEKILAVYVTNIVYALNNMLGEGDESNYDFMGYLSTFNTYKVFTNPNGSTLSDDKKENIRKSLSKFNALLKTKRLGYFGLEEPKTKDTRASEAYKKRVYHMLAIVGQIRQCVFHDKSGAKRFDLYSFINNIDPEYRETLDYLVDERFDSINKGFIQGNKVNISLLIDMMKGYEADDIIRLYYDFIVLKSQKNLGFSIKKLREKMLDEYGYRFKDKQYDSVRSKMYKLMDFLLFCNYYRNDVVAGEALVRKLRFSMTDDEKEGIYADEAAKLWGKFRNDFENIADHMNGDVIKELGKADMDFDEKILDSEKKNASDLLYFSKMIYMLTYFLDGKEINDLLTTLISKFDNIKEFLKIMKSSAVDVECELTAGYKLFNDSQRITNELFIVKNIASMRKPAASAKLTMFRDALTILGIDDNITDDRISEILKLKEKGKGIHGLRNFITNNVIESSRFVYLIKYANAQKIREVAKNEKVVMFVLGGIPDTQIERYYKSCVEFPDMNSSLEAKRSELARMIKNISFDDFKNVKQQAKGRENVAKERAKAVIGLYLTVMYLLVKNLVNVNARYVIAIHCLERDFGLYKEIIPELASKNLKNDYRILSQTLCELCDDRDESPNLFLKKNKRLRKCVEVDINNADSSMTRKYRNCIAHLTVVRELKEYIGDIRTVDSYFSIYHYVMQRCITKREDDKKQEEKIKFEDDLLKNHGYTKDFVKALNSPFGYNIPRFKNLSIEQLFDRNEYLTEK

SEQ ID NO: 320 - protein, 924 aa, Unknown
  human metagenome sequence
MAKKNKMKPRELREAQKKARQLKAAEINNNAVPAIAAMPAAEVIAPAAEKKKSSVKAAGMKSILVSENKMYITSFGKGNSAVLEYEVDNNDYNKTQLSSKDNSNIELGNVNEVNITFSSKHGFESGVEINTSNPTHRSGESSPVRWDMLGLKSELEKRFFGKTFDDNIHIQLIYNILDIEKILAVYVTNIVYALNNMLGEGDESNYDFMGYLSTFNTYKVFTNPNGSTLSDDKKENIRKSLSKFNALLKTKRLGYFGLEEPKTKDTRVLEAYKKRVYHMLAIVGQIRQCVFHDLSEHSEYDLYSFIDNSKKVYRECRETLDYLVDERFDSINKGFIQGNKVNISLLIDMMKGYEADDIIRLYYDFIVLKSQKNLGFSIKKLREKILDEYGFRFKDKQYDSVRSKMYKLMDFLLFCNYYRNDIAAGESLVRKLRFSMTDDEKEGIYADEAAKLWGKFRNDFENIADHMNGDVIKELGKADMDFDEKILDSEKKNASDLLYFSKMIYMLTYFLDGKEINDLLTTLISKFDNIKEFLKIMKSSAVDVECELTAGYKLFNDSQRITNELFIVKNIASMRKPAASAKLTMFRDALTILGIDDKITDDRISEILKLKEKGKGIHGLRNFITNNVIESSRFVYLIKYANAQKIREVAKNEKVVMFVLGGIPDTQIERYYKSCVEFPDMNSSLEAKRSELARMIKNISFDDFKNVKQQAKGRENVAKERAKAVIGLYLTVMYLLVKNLVNVNARYVIAIHCLERDFGLYKEIIPELASKNLKNDYRILSQTLCELCDDRDESPNLFLKKNRRLRKCVEVDINNADSSMTRKYRNCIAHLTVVRELKEYIGDIRTVDSYFSIYHYVMQRCITKREDDTKQEEKIKYEDDLLKNHGYTKDFVKALNSPFGYNIPRFKNLSIEQLFDRNEYLTEK

SEQ ID NO: 321 - protein, 919 aa, Unknown
  human metagenome sequence
MAKKNKMKPRELREAQKKARQLKAAEINNNAVPAIAAMPAAEVIAPAAEKKKSSVKAAGMKSILVSENKMYITSFGKGNSAVLEYEVDNNDYNKTQLSSKGSSNIELHGVNEINITFSSKHGFESGVEINTSNPTHRSGESSPVRWDMLGLKSELEKRFFGKTFDDNIHIQLIYNILDIEKILAVYVTNIVYALNNMLGIKDSESYDDFMGYLSAKNTYEVFTHPDKSNLSDKVKGNIKKSFSTFNDLLKTKRLGYFGLEEPKTKDTRVSQAYKKRVYHMLAIVGQIRQSVFHDKSSKLDEDLYSFIDIIDSEYRETLDYLVDERFDSINKGFIQGNKVNISLLIDMMKGYEADDIIRLYYDFIVLKSQKNLGFSIKKLREKMLDEYGFRFKDKQYDSVRSKMYKLMDFLLFCNYYRNDVAAGEALVRKLRFSMTDDEKEGIYADEAAKLWGKFRNDFENIADHMNGDVIKELGKADMDFDEKILDSEKKNASDLLYFSKMIYMLTYFLDGKEINDLLTTLISKFDNIKEFLKIMKSSAVDVECELTAGYKLFNDSQRITNELFIVKNIASMRKPAASAKLTMFRDALTILGIDDNITDDRISEILKLKEKGKGIHGLRNFITNNVIESSRFVYLIKYANAQKIREVAKNEKVVMFVLGGIPDTQIERYYKSCVEFPDMNSSLGVKRSELARMIKNISFDDFKNVKQQSKGRENVAKERAKAVIGLYLTVMYLLVKNLVNVNARYVIAIHCLERDFGLYKEIIPELASKNLKNDYRILSQTLCELCDKSPNLFLKKNERLRKCVEVDINNADSSMTRKYRNCIAHLTVVRELKEYIGDICTVDSYFSIYHYVMQRCITKRENDTKQEEKIKYEDDLLKNHGYTKDFVKALNSPFGYNIPRFKNLSIEQLFDRNEYLTEK

SEQ ID NO: 322 - protein, 922 aa, Unknown
  human metagenome sequence
MAKKNKMKPRELREAQKKARQLKAAEINNNAAPAIAAMPAAEVIAPAAEKKKSSVKAAGMKSILVSENKMYITSFGKGNSAVLEYEVDNNDYNKTQLSSKDNSNIELGDVDEVNITFSSKHGFGSGVEINTSNPTHRSGESSPVRWDMLGLKSELEKRFFGKTFDDNIHIQFIYNILDIEKILAVYVTNIVYALNNMLGIKDSESYDDFIGYLSARNTYKVFTHPDKSNLSDKAKGNIKKSFSTFNDLLKTKRLGYFGLEEPKTKDTRVLEAYKKRVYYMLAIVGQIRQCVFHDLSEHSEYDLYSFIDNSKKVYRECRETLDYLVDERFDSINKGFIQGNKVNISLLIDMMKGYEADDIIRLYYDFIVLKSQKNLGFSIKKLREKMLDEYGFRFKDKQYDSVRSKMYKLMDFLLFCNYYRNDVVAGEALVRKLRFSMTDDEKEGIYADEAAKLWVKFRNDFENIADHMNGDVIKELGKADMDFDEKILDSEKKNASDLLYFSKMIYMLTYFLDGKEINDLLTTLISKFDNIKEFLKIMKSSAVDVECELTAGYKLFNDSQRITNELFIVKNIASMRKPAASAKLTMFRDALTILGIDDNITDDRISEILKLKEKGKGIHGLRNFITNNVIESSRFVYLIKYANAQKIREVAENEKVVMFVLGGIPDTQIERYYKSCVEFPDMNSSLEVKRSELARMIKNISFDDFKNVKQQAKGRENVAKERAKAVIGLYLTVMYLLVKNLVNVNARYVIAIHCLERDFGLYKEIIPELASKNLKNDYRILSQTLCELCDKSPNLFLKKNERLRKCVEVDINNADSSMTRKYRNCIAHLTVVRELKEYIGDIRTVDSYFSIYHYVMQRCITKREDDTKQEEKIKYEDDLLKNHGYTKDFVKALNSPFGYNIPRFKNLSIEQLFDRNEYLTEK

SEQ ID NO: 323 - protein, 919 aa, Unknown
  human metagenome sequence
MAKKNKMKPRELREAQKKARQLKAAEINNNAAPAIAAMPAAEVIAPAAEKKKSSVKAAGMKSILVSENKMYITSFGKGNSAVLEYEVDNNDYNKTQLSSKDSSNIELRGVNEVNITFSSKHGFGSGVEINTSNPTHRSGESSPVRWDMLGLKSELEKRFFGKTFDDNIHIQLIYNILDIEKILAVYVTNIVYALNNMLGIKKSESHDDFMGYLSAKNTYDVFTNPNGSTLSDDKKKNIRKSLRKFNDLLKTKRLGYFGLEEPKTKDTRVSQAYKKRVYHMLAIVGQIRQSVFHDKSSKLHEDLYSFIDIIDSEYRETLDYLVDERFDSINKGFIQGNKVNISLLIDMMKGYEADDIIRLYYDFIVLKSQKNLGFSIKKLREKMLDEYGFRFKDKQYDSVRSKMYKLMDFLLFCNYYRNDVAAGEALVRKLRFSMTDDEKEGIYADEAAKLWGKFRNDFENIADHMNGDVIKELGKADMDFDEKIIDSEKKNASDLLYFSKMIYMLTYFLDGKEINDLLTTLISKFDNIKEFLKIMKSSAVDVECELTAGYKLFNDSQRITNELFIVKNIASMRKPASSAKLTMFRDALTILGIDDNITDDRISEILKLKEKGKGIHGLRNFITNNVIESSRFVYLIKYANAQKIRKVAKNEKVVMFVLGGIPDTQIERYYKSCVEFPDMNSSLEVKRSELARMIKNISFDDFKNVKQQAKGRENVAKERAKAVIGLYLTVMYLLVKNLVNVNARYVIAIHCLERDFGLYKEIIPELASKNLKNDYRILSQTLCELCDESPNLFLKKNERLRKCVEVDINNADSSMTRKYRNCIAHLTVVRELKEYIGDIRTVDSYFSIYHYVMQRCITKREDDKKQEEKIKFEDDLLKNHGYTKDFVKALNSPFGYNIPRFKNLSIEQLFDRNEYLTEK

SEQ ID NO: 324 - protein, 922 aa, Unknown
  human metagenome sequence
MAKKNKMKPRELREAQKKARQLKAAEINNNAAPAIAAMPAAEAAAPAAEKKKSSVKAAGMKSILVSENKMYITSFGKGNSAVLEYEVDNNDYNKTQLSSKDSSNIELHGVNEVNITFSSKHGFESGVEINTSNPTHRSGESSPVRGDMLGLKSELEKRFFGKTFDDNIHIQLIYNILDIEKILAVYVTNIVYALNNMLGVKGSESYDDFMGYLSAQNTYYIFTHPDKSNLSDKVKGNIKKSLSKFNDLLKTKRLGYFGLEEPKTKDKRVSEAYKKRVYHMLAIVGQIRQSVFHDKSSKLDEDLYSFIDIIDSEYRETLDYLVDERFDSINKGFIQGNKVNISLLIDMMKGYEADDIIRLYYDFIVLKSQKNLGFSIKKLREKMLDEYGFRFKDKQYDSVRSKMYKLMDFLLFCNYYRNDVVAGEALVRKLRFSMTDDEKEGIYADEAAKLWGKFRNDFENIADHMNGDVIKELGKADMDFDEKILDSEKKNASDLLYFSKMIYMLTYFLDGKEINDLLTTLISKFDNIKEFLKIMKSSAVDVECELTAGYKLFNDSQRITNELFIVKNIASMRKPAASAKLTMFRDALTILGIDDKITDDRISEILKLKEKGKGIHGLRNFITNNVIESSRFVYLIKYANAQKIREVAKNEKVVMFVLGGIPDTQIERYYKSCVEVPDMNSSLEVKRSELARMIKNISFDDFKNVKQQAKGRENVAKERAKAVIGLYLTVMYLLVKNLVNVNARYVIAIHCLERDFGLYKEIIPELASKNLKNDYRILSQTLCELCDDRDKSSNLFLKKNKRLRKCVEVDINNADSRMTRKYRNCIAHLTVVRELKEYIGDIRTVDSYFSIYHYVMQRCITKREDDTKREEKIKYEDDLLKNHGYTKDFVKALNSPFGYNIPRFKNLSIEQLFDRNEYLTEK

SEQ ID NO: 325 - protein, 922 aa, Unknown
  human metagenome sequence
MAKKNKMKPRELREAQKKARQLKAAEINNNAAPAIAAMPAAEAAAPAAEKKKSSVKAAGMKSILVSENKMYITSFGKGNSAVLEYEVDNNDYNKTQLSSKGSSNIELHGVNEVNITFSSKHGFESGVEINTSNPTHRSGESSPVRGDMLGLKSELEKRFFGKTFDDNIHIQLIYNILDIEKILAVYVTNIVYALNNMLGEGDDESHDDFMGYLSTFNTYKVFTNPNGSTLSDDKKENIRKSLSKFNALLKTKRLGYFGLEEPKTKDTRASEAYKKRVYHMLAIVGQIRQSVFHDKSNELDEYLYSFIDIIDSEYRETLDYLIDERFDSINKGFIQGNKVNISLLIDMMKGYEADDIIRLYYDFIVLKSQKNLGFSIKKLREKMLDEYGFRFKDKQYDSVRSKMYKLMDFLLFCNYYRNDVVAGESLVRKLRFSMTDDEKEGIYADEAEKLWGKFRNDFENIADHMNGDVIKELGKADMDFDEKILDSEKKNASDLLYFSKMIYMLTYFLDGKEINDLLTTLISKFDNIKEFLKIMKSSAVDVECELTAGYKLFNDSQRITNELFVVKNIASMRKPAASAKLTMFRDALTILGIDDKITDDRISEILKLKEKGKGIHGLRNFITNNVIESSRFVYLIKYANAQKIREVAKNEKVVMFVLGGIPDTQIERYYKSCVEFPDMNSSLEAKRSELARMIKNISFDDFKNVKQQAKGRENVAKERAKAVIGLYLTVMYLLVKNLVNVNARYVIAIHCLERDFGLYKEIIPELASKNLKNDYRILSQTLCELCDDRDESPNLFLKKNERLRKCVEVDINNADSSMTRKYRNCIAHLTVVRELKEYIGDIRTVDSYFSIYHYVMQRCITKRENDTKQEEKIKYEDDLLKNHGYTKDFVKALNSPFGYNIPRFKNLSIEQLFDRNEYLTEK

SEQ ID NO: 326 - protein, 922 aa, Unknown
  human metagenome sequence
MAKKNKMKPRELREAQKKARQLKAVEINNNAVPEIAAMPAAEVIAPVAEKKKSSVKAAGMKSILVSENKMYITSFGKGNSAVLEYEVDNNDYNKTQLSSKDNSNIELCDVDEVNITFSSKHGFESGVKINTSNPTHRSGESSSVRGDMLGLKSELEKRFFGKTFDDNIHIQLIYNILDIEKILAVYVTNIVYALNNMLGVKDSESYDDFMGYLSAKNTYDVFTDPDESDLSKNIKGNIKKSLSKFNALLKTKRLGYFGLEEPKTKDTRASEAYKKRVYHMLAIVGQIRQCVFHDKSGAKRFDLYSFINNIDPEYRETLDYLVDERFDSINKGFIQGNKVNISLLIDMMKGYEADDIIRLYYDFIVLKSQKNLGFSIKKLREKMLDEYGFRFKDKQYDSVRSKMYKLMDFLLFCNYYRNDIAAGESLVRKLRFSMTDDEKEGIYADEAAKLWGKFRNDFENIADHMNGDVIKELGKADMDFDEKILDSEKKNASDLLYFSKMIYMLTYFLDGKEINDLLTTLISKFDNIKEFLKIMKSSAVDVECELTAGYKLFNDSQRITNELFIVKNIASMRKPAASAKLTMFRDALTILGIDDKITDDRISEILKLKEKGKGIHGLRNFITNNVIESSRFVYLIKYANAQKIREVAKNEKVVMFVLGGIPDTQIERYYKSCVEFPDMNSSLKVKRSELARMIKNIRFDDFKNVKQQAKGRENVAKERAKAVIGLYLTVMYLLVKNLVNVNARYVIAIHCLERDFGLYKEIIPELASKNLKNDYRILSQTLCELCDDRDESPNLFLKKNRRLRKCVEVDINNADSSMTRKYRNCIAHLTVVRELKEYIGDIRTVDSYFSIYHYVMQRCITKREDDTKQEEKIKYEDDLLKNHGYTKDFVKALNSPFGYNIPRFKNLSIEQLFDRNEYLTEK

SEQ ID NO: 327 - protein, 924 aa, Unknown
  human metagenome sequence
MAKKNKMKPRELREAQKKARQFKAAEINNNAAPAIAAMPAAEVIAPVAEKKKSSVKAAGMKSILVSENKMYITSFGKGNSAVLEYEVDNNDYNKTQLSSKDNSNIELCGVNEVNITFSSKHGFESGVEINTSNPTHRSGESSPVRWDMLGLKSELEKRFFGKTFDDNIHIQLIYNILDIEKILAVYVTNIVYALNNMLGEGDESNYDFMGYLSTFNTYKVFTNPNGSTLSDDKKENIRKSLSKFNALLKTKRLGYFGLEEPKTKDTRVLEAYKKRVYHMLAIVGQIRQCVFHDLSEHSEYDLYSFIDNSKKVYRECRETLDYLVDERFDSINKGFIQGNKVNISLLIDMMKGYEADDIIRLYYDFIVLKSQKNLGFSIKKLREKILDEYGFRFKDKQYDSVRSKMYKLMDFLLFCNYYRNDIAAGESLVRKLRFSMTDDEKEGIYADEAAKLWGKFRNDFENIADHMNGDVIKELGKADMDFDEKILDSEKKNASDLLYFSKMIYMLTYFLDGKEINDLLTTLISKFDNIKEFLKIMKSSAVDVECELTAGYKLFNDSQRITNELFIVKNIASMRKPAASAKLTMFRDALTILGIDDNITDDRISEILKLKEKGKGIHGLRNFITNNVIESSRFVYLIKYANAQKIREVAKNEKVVMFVLGGIPDTQIERYYKSCVEFPDMNSSLEVKRSELARMIKNIRFDDFKNVKQQAKGRENVAKERAKAVIGLYLTVMYLLVKNLVNVNARYVIAIHCLERDFGLYKEIIPELASKNLKNDYRILSQTLCELCDNRDESPNLFLKKNKRLRKCVEVDINNADSSMTRKYRNCIAHLTVVRELKEYIGDIRTVDSYFSIYHYVMQRCITKREDDTKQEDKIKYEDDLLKNHGYTKDFVKALNSPFGYNIPRFKNLSIEQLFDRNEYLTEK

SEQ ID NO: 328 - protein, 922 aa, Unknown
  human metagenome sequence
MAKKNKMKPRELREAQKKARQLKAAEINNNAAPAIAAMPAAEVIAPAAEKKKSSVKAAGMKSILVSENKMYITSFGKGNSAVLEYEVDNNDYNQTQLSSDGSSNIELRGVNEVNITFSSKHGFESGVEINTSNPTHRSGESSPVRGDMLGLKSELEKRFFGKTFDDNIHIQLIYNILDIEKILAVYVTNIVYALNNMLGVKGSESYDDFMGYLSAQNTYYIFTHPDKSNLSDKVKGNIKKSLSKFNDLLKTKRLGYFGLEEPKTKDKRVSEAYKKRVYHMLAIVGQIRQSVFHDKSNELDEYLYSFIDIIDSEYRDTLDYLVDERFDSINKGFVQGNKVNISLLIDMMKGYEVDDIIRLYYDFIVLKSQKNLGFSIKKLREKMLDEYGFRFKDKQYDSVRSKMYKLMDFLLFCNYYRNDVVAGESLVRKLRFSMTDDEKEGIYADEAAKLWGKFRNDFENIADHMNGDVIKELGKADMGFDEKILDSEKKNASDLLYFSKMIYMLTYFLDGKEINDLLTTLISKFDNIKEFLKIMKSSAVNVECELTAGYKLFNDSQRITNELFIVKNIASMRKPAASAKLTMFRDALTILGIDDKITDDRISEILKLKEKGKGIHGLRNFITNNVIESSRFVYLIKYANAQKIREVAKNEKVVMFVLGGIPDTQIERYYKSCVEFPDMNSSLKAKRSELARMIKNISFEDFKDVKQQAKGRENVAKERAKAVIGLYLTVMYLLVKNLVNVNARYVIAIHCLERDFGLYKEIIPELASKNLKNDYRILSQMLCELCDDRDKSPNLFLKKNKRLRKCVEVDINNADSSMTRKYRNCIAHLTVVRELKEYIGDIYAVDSYFSIYHYVMQRCITKRENDTKQEEKIKYEDNLLKNHGYTKDFVKALNSPFGYNIPRFKNLSIEQLFDRNEYLTEK

SEQ ID NO: 329 - protein, 880 aa, Unknown
  mammals-digestive system-feces sequence
MNKIHKKQGKTTAKSLGLKSVLKIENDLVVTTFGKKDNPMVVEQSINKASGEKELYVDEDQVKFDSSLIKEKNILSLDSIQHSNHQIIVNIDQKDASEIGMDYLRLKPELEKEFFGKTFYDNVHIQIAYNLLDLKKIIGLHIGNAIQALENLGRDGSDLVGICDATKPLNYLDDVKQKADIGFMNRLKPYFMYFDGVLKLDNSKNKNGELNQLDIENWDVIRILSLIRQGCAHAGAYSSLLYTAQNNKVYADLINKALSIFSDDLDKFNKSFLKQSKMNLFILFDLYNCRFDRSLQEKIIKEYYRYVLYKDNKNLGFSLKNVRNLIIEGKYDEQERSGKLQTIRSKLNTLLDFYLYGYYQKNPTFVENIVAKLRESKNDEDKEKVYEEEYHRLLSENNYLVDKKCSDIVYRINEAVKNRKIFVNANINAVVEKVSCSCFPSLIYVLCKFLDGKEVNELTTAIINKLENIASLINALVTLKSYGGFSEQYKIFDYPNINGLIDDFRMVKNLTSTKRKLKKASGGEDRIGRQLYADAINIFKEDSFVSANDEKGTGLDQYVNKFFSKDDLGARKVRNLLLNNIIKNRRFVYLIKYIDPKDCYKLVHNEKIVRFALGQYDESQMPLNQLQKYYDAVIENREGFRKCNDRKKIIDTLVSEINRVSIDGILDIGNRLVNRGNNDYINHQKQIISLYLTIAYLIVKGVVHTNSLYFIAWHAYERDNNFKFGNDGKDYLALTKEYLTNKKKRVKQLLDHNIEEANNSLDSKYFSAYRNKVVHLNFCNIFVNYLDGIGDIHSYYDIYQYVIQKWSIAERSKDFIDPQYLTKLSNDLKQYRTYQRNFLKIINLPFAYNLARYKNLTIGDLFNDKYPLPKETVKEFYNEE

SEQ ID NO: 330 - protein, 926 aa, Unknown
  metagenome sequence
MAKKNKMKPRELREAQKKARQLKAAEINNNAAPAIAAMPAAQVIAPAAEKKKSSVKAAGMKSILVSENKMYITSFGKGNSAVLEYEVDKVDNNNYNKTQLSSKDNSNIELGDVNEVNITFSSKHGFESGVEINTSNPTHRSGESSPVRWDMLGLKSELEKRFFGKTFDDNIHIQLIYNILDIEKILAVYVTNIVYALNNMLGIKGSESYDDFMGYLSARNTYEVFTHPDKSNLSDKVKGNIKKSFSTFNDLLKTKRLGYFGLEEPKTKDTRVSEAYKKRVYHMLAIVGQIRQCVFHDLSEHSEYDLYSFIDNSKKVYRECRETLNYLVDERFDSINKGFIQGNKVNISLLIDMMKDDYEADDIIHLYYDFIVLKSQKNLGFSIKKLREKMLDEYGFRFKDKQYDSVRSKMYKLMDFLLFCNYYRNDVVAGEALVRKLRFSMTDDEKEGIYADEAEKLWGKFRNDFENIADHMNGDVIKELGKADMDFDEKILDSEKKNASDLLYFSKMIYMLTYFLDGKEINDLLTTLISKFDNIKEFLKIMKSSAVDVECELTAGYRLFNDSQRITNELFIVKNIASMRKPAASAKLTMFRDALTILGIDDKITDDRISEILKLKEKGKGIHGLRNFITNNVIESSRFVYLIKYANAQKIREVAKNEKVVMFVLGGIPDTQIERYYKSCVEFPDMNSSLEAKRSELARMIKNISFDDFKNVKQQAKGRENVAKERAKAVIGLYLTVMYLLVKNLVNVNARYVIAIHCLERDFGLYKEIIPELASKNLKNDYRILSQTLCELCDESPNLFLKKNERLRKCVEVDINNADSSMTRKYRNCIAHLTVVRELKEYIGDIRTVDSYFSIYHYVMQRCITKREDDKKQEEKIKFEDDLLKNHGYTKDFVKALNSPFGYNIPRFKNLSIEQLFDRNEYLTEK

SEQ ID NO: 331 - protein, 952 aa, Unknown
  metagenome sequence
MGKKIHARDLREQRKTDRTEKFADQNKKREAERAVQKKDAAVSVKSVSSVSSKKDNVTKSMAKAAGVKSVFAVGNTVYMTSFGRGNDAVLEQKIVDTSHEQLNIDDPAYQLNVVTMNGYSVTGHRGETVSAVTDNPLRRFNGGKKDEPEQSVPTDMLCLKPTLEKKFFGKEFNDNIHIQLIYNILDIEKILAVYSTNAIYALNNMSADENIENSDFFMKRTTDETFDDFEKKKESTNSREKADFDAFEKFIGNYRLAYFADAFYVNKKNPKGKAKNVLREDKELYSVLTLIGKLRHWCVHSEEGRAEFWLYKLNELKDDFKNVLDVVYNRPVEEINNRFIENNKVNIQILGSVYKNTDIAELVRSYYEFLITKKYKNMGFSIKKLRESMLEGKGYADKEYDSVRNKLYQMTDFILYTGYINEDSDRADDLVNTLRSSLKEDDKTTVYCKEADYLWKKYRESIREVADALDGDNIKRLSKSNIEIQEDKLRKCFISYADSVSEFTKLIYLLTRFLSGKEINDLVTTLINKFDNIRSFLEIMDELGLDRTFTAEYSFFEGSTKYLAELVELNSFVKSCSFDINAKRTMYRDALDILGIKSGKTEEDIEKMIDNILQIDANGDKKLKKNNGLRNFIASNVIDSNRFKYLVRYGNPKKIRETAKCKPAVRFVLNEIPDAQIERYYEACCPENTALCSANKKREKLADMIAEIEFENFSDAGNYQKANVTSKTHEAEIKRKNQSIIRLYLTVMYIMLKNLVNVNARYVIAFHCVERDTKLYAESGLEVGNIEKNKTNLTMAVMGVKLENGIIKTEFDKSLAENAANRYLRNARWYKLILDNLKKSERAVVNEFRNTVCHLNAIRNINIKEIKEVENYFALYHYLIQKHLENRFADKKVERDTGDFISKLEEHKTYCKDFVKAYCTPFGYNLVRYKNLTIDGLFDKNYPGKDDSDKQK

SEQ ID NO: 332 - protein, 923 aa, Unknown
  metagenome sequence
MAKKNKMKPRELREAQKKARQLKAAEINNNAVPAIAAMPAAEVIAPAAEKKKSSVKAAGMKSILVSENKMYITSFGKGNSAVLEYEVDKVDDNDYNKTQLSSKDNSNIELGNVNEVNITFSSRRGFESGVEINTSNPTHRSGESSSVRGDMLGLKSELEKRFFGKTFDDNIHIQLIYNILDIEKILAVYVTNIVYALNNMLGVKGSESYDDFMGYLSAQNTYYIFTHPDKSNLSDKVKGNIKKSLSKFNDLLKTKRLGYFGLEEPKTKDKRVSEAYKKRVYHMLAIVGQIRQSVFHDKSNELDEYLYSFIDIIDSEYRDTLDYLVDERFDSINKGFIQGNKVNISLLIDMMKDDYEADDIIRLYYDFIVLKSQKNLGFSIKKLREKMLEEYGFRFKDKQYDSVRSKMYKIMDFLLFCNYYRNDVVAGEALVRKLRFSMTDDEKEGIYADEAAKLWGKFRNDFENIADHMNGDVIKELGKADMDFDEKILDSEKKNASDLLYFSKMIYMLTYFLDGKEINDLLTTLISKFDNIKEFLKIMKSSAVDVECELTAGYKLFNDSQRITNELFIVKNIASMRKPAASAKLTMFRDALAILGIDDKITDDRISEILKLKEKGKGIHGLRNFITNNVIESSRFVYLIKYANAQKIREVAKNEKVVMFVLGGIPDTQIERYYKSCVEVPDMNSSLEAKRSELARMIKNIRFDDFKNVKQQAKGRENVAKERAKAVIGLYLTVMYLLVKNLVNVNARYVIAIHCLERDFGLYKEIIPELASKNLKNDYRILSQTLCELCDKSPNLFLKKNERLRKCVEVDINNADSSMTRKYRNCIAHLTVVRELKEYIGDIRTVDSYFSIYHYVMQRCITKRENDTKQEDKIKYEDDLLKNHGYTKDFVKALNSPFGYNIPRFKNLSIEQLFDRNEYLTEK

SEQ ID NO: 333 - protein, 928 aa, Unknown
  metagenome sequence
MAKKNKMKPRELREAQKKARQLKAAEINNNAAPAIAAMPAAEAAAPAAEKKKSSVKAAGMKSILVSENKMYITSFGKGNSAVLEYEVDKVDNNDYNQTQLSSKGSSNIELHGVNEVNITFSSKHGFESGVEINTSNPTHRSGESSPVRWDMLGLKSELEKRFFGKTFDDNIHIQLIYNILDIEKILAVYVTNIVYALNNMLGIKDSESYDDFMGYLSAKNTYDVFTDPDESDLSKNIKGNIKKSFSTFNDLLKTKRLGYFGLEEPKTKDTRVSEAYKKRVYHMLAIVGQIRQCVFHDLSEHSEYDLYSFIDNSKKVYRECRETLNYLVDERFDSINKGFIQGNKVNISLLIDMMKGYEADDIIRLYYDFIVLKSQKNLGFSIKKLREKMLDEYGFRFKDKQYDSVRSKMYKLMDFLLFCNYYRNDVVAGEALVRKLRFSMTDDEKEGIYADEAAKLWGKFRNDFENIADHMNGDVIKELGKADMDFDEKILDSEKKNASDLLYFSKMIYMLTYFLDGKEINDLLTTLISKFDNIKEFLKIMKSSAVDVECELTAGYKLFNDSQRITNELFVVKNIASMRKPAASAKLTMFRDALTILGIDDKITDDRISEILKLKEKGKGIHGLRNFITNNVIESSRFVYLIKYANAQKIREVAKNEKVVMFVLGGIPDTQIERYYKSCVEFPDMNSSLEAKRSELARMIKNISFDDFKNVKQQAKGRENVAKERAKAVIGLYLTVMYLLVKNLVNVNARYVIAIHCLERDFGLYKEIIPELASKNLKNDYRILSQTLCELCDDRDESPNLFLKKNERLRKCVEVDINNADSSMTRKYRNCIAHLTVVRELKEYIGDIRTVDSYFSIYHYVMQRCITKREDDTKQEEKIKYEDDLLKNHGYTKDFVKALNSPFGYNIPRFKNLSIEQLFDRNEYLTEK

SEQ ID NO: 334 - protein, 922 aa, Unknown
  metagenome sequence
MAKKNKMKPRELREAQKKARQLKAAEINNNAVPAIAAMPAAEVIAPAAEKKKSSVKAAGMKSILVSENKMYITSFGKGNSAVLEYEVDKVDNNNYNKTQLSSESSSNIELCGVTKVNITFSSKHGFGSGVEINTSNPTHRSGESSPVRWDMLGLKSELEKRFFGKTFDDNIHIQLIYNILDIEKILAVYVTNIVYALNNMLGVKGSESYDDFMGYLSAQNTYYIFTHPDKSNLSDKVKGNIKKSLSKFNDLLKTKRLGYFGLEEPKTKDTRVSQAYKKRVYHMLAIVGQIRQCVFHDKSGAKRFDLYSFINNIDPEYRDTLDYLVDERFDSINKGFIQGNKVNISLLIDMMKGYEVDDIIRLYYDFIVLKSQKNLGFSIKKLREKMLDEYGFRFKDKQYDSVRSKMYKLMDFLLFCNYYRNDVAAGEALVRKLRFSMTDDEKEGIYADEAEKLWGKFRNDFENIADHMNGDAIKELGKADMDFDEKILDSEKKNASDLLYFSKMIYMLTYFLDGKEINDLLTTLISKFDNIKEFLKIMKSYAVDVECELTAGYKLFNDSQRITNELFIVKNIASMRKPAASAKLTMFRDALTILGIDDNITDDRISEILKLKEKGKGIHGLRNFITNNVIESSRFVYLIKYANAQKIREVAKNEKVVMFVLGGIPDTQIERYYKSCVEFPDMNSSLEAKRSELARMIKNIRFDDFKNVKQQAKGRENVAKERAKAVIGLYLTVMYLLVKNLVNVNARYVIAIHCLERDFGLYKEIIPELASKNLKNDYRILSQKLCELCDKSPNLFLKKNERLRKCVEVDINNADSIMTRKYRNCIAHLTVVRELKEYIGDIRTVDSYFSIYHYVMQRCITKRENDTKQEDKIKYEDDLLKNHGYTKDFVKALNSPFGYNIPRFKNLSIEQLFDRNEYLTEK

SEQ ID NO: 335 - protein, 922 aa, Unknown
  metagenome sequence
MAKKNKMKPRELREAQKKARQLKAAEINNNAAPAIAAMPAAEVIAPAAEKKKSSVKAAGMKSILVSENKMYITSFGKGNSAVLEYEVDKVDNNNYNKTQLSSKDNSNIELGDVNEVNITFSSKRGNESGVEINTSNPTHRSGESSPVRWDMLGLKSELEKRFFGKTFDDNIHIQLIYNILDIEKILAVYVTNIVYALNNMLGIKKSESYDDFMGYLSARNTYEVFTHPDKSNLSDKAKGNIKKSFSTFNDLLKTKRLGYFGLEEPKTKDTRVSQAYKKRVYHMLAIVGQIRQSVFHDKSSKLDEDLYSFIDIIDSEYRETLDYLVDERFDSINKGFIQGNKVNISLLIDMMKGYETDDIIRLYYDFIVLKSQKNLGFSIKKLREKMLDEYGFRFKDKQYDSVRSKMYKLMDFLLFCNYYRNDVVAGEALVRKLRFSMTDDEKEGTYADEAEKLWGKFRNDFDNIAGHMNGDAIKELGKADMDFDEKILDSEKKNASDLLYFSKMIYMLTYFLDGKEINDLLTTLISKFDNIKEFLKIMKSSAVDVECELTAGYKLFNDSQRITNELFIVKNIASMRKPAASAKLTMFRDALTILGIDDKITDDRISEILKLKEKGKGIHGLRNFITNNVIESSRFVYLIKYANAQKIREVAKNEKVVMFVLGGIPDTQIERYYKSCVEFPDMNSSLEAKRSELARMIKNIRFDDFKNVKQQAKGRENVAKERAKAVIGLYLTVMYLLVKNLVNVNARYVIAIHCLERDFGLYKEIIPELASKNLKNDYRTLSQTLCGLCDKSPNLFLKKNKRLRKCVEVDINNADSIMTRKYRNCIAHLTVVRELKEYIGDIRTVDSYFSIYHYVMQRCITKREDDTKQEEKIKYEDDLLKNHGYTKDFVKALNSPFGYNIPRFKNLSIEQLFDRNEYLTEK

SEQ ID NO: 336 - protein, 926 aa, Unknown
  metagenome sequence
MAKKNKMKPRELREAQKKARQLKAAEINNNAAPAIAAMPAAEVIAPAAEKKKSSVKAAGMKSILVSENKMYITSFGKGNSAVLEYEVDKVDNDDYNKTQLSSKGSSNIELHGVNEVNITFSSKHGFESGVEISTSNPTHRSGESSPVRWDMLGLKSELEKRFFGKTFDDNIHIQFIYNILDIEKILAVYVTNIVYALNNMLGVKDSESYDDFMGYLSARNTYKVFTHPDKSNLSDKVKGNIKKSFSTFNDLLKTKRLGYFGLEEPKTKDTRVSQAYKKRVYHMLAIVGQIRQCVFHDKSSKLHEDLYSFINNIDPEYRDTLDYLVEERLKSINKDFIEGNKVNISLLIDMMKDDYEADDIIRLYYDFIVLKSQKNLGFSIKKLREKMLDEYGFRFKDKQYDSVRSKMYKLMDFLLFCNYYRNDVVAGEALVRKLRFSMTDDEKEGIYADEAAKLWGKFRNDFENIADHMNGDVIKELGKADMDFDEKILDSEKKNASDLLYFSKMIYMLTYFLDGKEINDLLTTLISKFDNIKEFLKIMKSSAVDVECKLTAGYKLFNDSQRITNELFIVKNIASMRKPAASAKLTMFRDALTILGIDDKITDDRISEILKLKEKGKGIHGLRNFITNNVIESSRFVYLIKYANAQKIREVAKNEKVVMFVLGGIPDTQIERYYKSCVEFPDMNSSLEAKRSELARMIKNISFDDFKNVKQQAKGRENVAKERAKAVIGLYLTVMYLLVKNLVNVNARYVIAIHCLERDFGLYKEIIPELASKNLKNDYRILSQTLCELCDDRDESPNLFLKKNKRLRKCVEVDINNADSSMTRKYRNCIAHLTVVRELKEYIGDIRTVDSYFSIYHYVMQRCITKRENDTKQEDKIKYEDDLLKNHGYTKDFVKALNSPFGYNIPRFKNLSIEQLFDRNEYLTEK

SEQ ID NO: 337 - protein, 925 aa, Unknown
  metagenome sequence
MAKKNKMKPRELREAQKKARQLKAAEINNNAAPAIAAMPAAEVIAPAAEKKKSSVKAAGMKSILVSENKMYITSFGKGNSAVLEYEVDKVDNNNYNKTQLSSKDNSNIELGDVNEVNITFSSKRGNESGVEINTSNPTHRSGESSPVRWDMLGLKSELEKRFFGKTFDDNIHIQLIYNILDIEKILAVYVTNIVYALNNMLGIKKSESYDDFMGYLSARNTYEVFTHPDKSNLSDKAKGNIKKSFSTFNDLLKTKRLGYFGLEEPKTKDTRVSQAYKKRVYHMLAIVGQIRQSVFHDKSSKLDEDLYSFIDIIDSEYRETLDYLVDERFDSINKGFIQGNKVNISLLIDMMKGYEADDIIRLYYDFIVLKSQKNLGFSIKKLREKMLEEYGYRFKDKQYDSVRSKMYKLMDFLLFCNYYRNDVIAGEALVRKLRFSMTDDEKEGIYADEAAKLWGKFRNDFENIADHMNGDAIKELGKADMDFDEKILDSEKKYASDLLYFSKMIYMLTYFLDGKEINDLLTTLISKFDNIKEFLKIMKSSAVDVECELTAGYKLFNDSQRITNELFIVKNIASMRKPAASAKLTMFRDALTILGIDDNITDDRISEILKLKEKGKGIHGLRNFITNNVIESSRFVYLIKYANAQKIREVAKNEKVVMFVLGGIPDTQIERYYKSCVEFPDMNSSLEAKRSELARMIKNISFDDFKNVKQQAKGRENVAKERAKAVIGLYLTVMYLLVKNLVNVNARYVIAIHCLERDFGLYKEIIPELASKNLKNDYRILSQTLCELCDERDKSPNLFLKKNERLRKCVEVDINNADSIMTRKYRNCIAHLTVVRELKEYIGDIRTVDSYFSIYHYVMQRCITKREDDTKQEEKIKYEDDLLKNHGYTKDFVKALNSPFGYNIPRFKNLSIEQLFDRNEYLTEK

SEQ ID NO: 338 - protein, 925 aa, Unknown
  metagenome sequence
MAKKNKMKPRELREAQKKARQLKAAEINNNAAPAIAAMPAAEVIAPVAGKKKSSVKAAGMKSILVSENKMYITSFGKGNSAVLEYEVDKVDNNDYNQTQLSSKGSSNIELCGVNEVNITFSSKHGFESGVEINTSNPTHRSGESSPVRWDMLGLKSELEKRFFGKTFDDNIHIQLIYNILDIEKILAVYVTNIVYALNNMLGIKKSESYDDFMGYLSARNTYEVFTHPDKSNLSDKAKGNIKKSFSTFNDLLKTKRLGYFGLEEPKTKDTRVSQAYKKRVYHMLAIVGQIRQSVFHDKSSKLDEDLYSFIDIIDSEYRETLDYLVEERLKSINKDFIEGNKVNISLLIDMMKGFEADDIIRLYYDFIVLKSQKNLGFSIKKLREKMLEEYGYRFKDKQYDSVCSKMYKLMDFLLFCNYYRNDVVAGEALVRKLRFSMTDDEKEGIYADEAAKLWGKFRNDFENIADHMNGDVIKELGKADMDFDEKILDSEKKNASDLLYFSKMIYMLTYFLDGKEINDLLTTLISKFDNIKEFLKIMKSSAVDVECELTAGYKLFNDSQRITNELFIVKNIASMRKPAASAKLTMFRDALTILGIDDKITDDRISEILKLKEKGKGIHGLRNFITNNVIESSRFVYLIKYANAQKIREVAKNEKVVMFVLGGIPDTQIERYYKSCVEFPDMNSSLEVKRSELARMIKNISFDDFKNVKQQAKGRENVAKERAKAVIGLYLTVMYLLVKNLVNVNARYVIAIHCLERDFGLYKEIIPELASKNLKNDYRILSQTLCELCDDRDKSSNLFLKKNKRLRKCVEVDINNADSSMTRKYRNCIAHLTVVRELKEYIGDIRTVDSYFSIYHYVMQRCITKREDDTKQEDKIKYEDNLLKNHGYTKDFVKALNSPFGYNIPRFKNLSIEQLFDRNEYLTEK

SEQ ID NO: 339 - protein, 919 aa, Unknown
  metagenome sequence
MAKKNKMKPRELREAQKKARQLKAAEINNNAVPAIAAMPAVEVIAPAAEKKKSSVKAAGMKSILVSENKMYITSFGKGNSAVLEYEVDNNDYNKTQLSSKDNSNIELGNVNEVNITFSSRRGFESGVEINTSNPTHRSGESSSVRGDMLGLKSELEKRFFGKTFDDNIHIQLIYNILDIEKILAVYVTNIVYALNNMLGVKGSESYDDFMGYLSAQNTYYIFTHPDKSNLSDKVKGNIKKSLSKFNDLLKTKRLGYFGLEEPKTKDKRVSEAYKKRVYHMLAIVGQIRQSVFHDKSNELDEYLYSFIDIIDSEYRDTLDYLVDERFDSINKGFIQGNKVNISLLIDMMKGYEADDIIRLYYDFIVLKSQKNLGFSIKKLREKMLDEYGFRFKDKQYDSVRSKMYKLMDFLLFCNYYRNDVVAGEALVRKLRFSMTDDEKEGIYADEAAKLWGKFKNDFENIADHMNGDVIKEFGKADMDFDEKILDSEKKNASDLLYFSKMIYMLTYFLDGKEINDLLTTLISKFDNIKEFLKIMKSSAVDVECELTAGYKLFNDSQRITNELFIVKNIASMRKPAASAKLTMFRDALTILGIDDNITDDRISEILKLKEKGKGIHGLRNFITNNVIESSRFVYLIKYANAQKIREVAKNEKVVMFVLGGIPDTQIERYYKSCVEFPDMNSSLEAKRSELARMIKNIRFDDFKNVKQQAKGRENVAKERAKAVIGLYLTVMYLLVKNLVNVNARYVIAIHCLERDFGLYKEIIPELASKNLKNDYRILSQTLCELCDKSPNLFLKKNERLRKCVEVDINNADSSMTRKYRNCIAHLTVVRELKEYIGDIRTVDSYFSIYHYVMQRCITKRENDTKQEDKIKYEDDLLKNHGYTKDFVKALNSPFGYNIPRFKNLSIEQLFDRNEYLTEK

SEQ ID NO: 340 - protein, 954 aa, Unknown
  metagenome sequence
MGKKIHARDLREQRKTDRTEKFADQNKKREAERAVQKKDAAVSVKSVSSVSSKKDNVTKSMAKAAGVKSVFAVGNTVYMTSFGRGNDAVLEQKIVDTSHEPLNIDDPAYQLNVVTMNGYSVTGHRGETVSAVTDNPLRRFNGGKKDEPEQSVPTDMLCLKPTLEKKFFGKEFNDNIHIQLIYNILDIEKILAVYSTNAIYALNNMSADENIENSDFFMKRTTDETFDDFEKKKESTNSREKADFDAFEKFIGNYRLAYFADAFYVNKKNPKGKARNVLREDKELYSVLTLIGKLRHWCVHSEEGRAEFWLYKLDELKDDFKNVLDVVYNRPVEEINNRFIENNKVNIQILGSVYKNTDIAELVRSYYEFLITKKYKNMGFSIKKLRESMLEGKGYADKEYDSVRNKLYQMTDFILYTGYINEDSDRADDLVNTLRSSLKEDDKTTVYCKEADYLWKKYRESIREVADALDVDNIKNLSGSNIEIRDNELRKCFISYADSVSEFTKLIYLLTRFLSGKEINDLVTTLINKFDNIRSFLEILDELGLDRTFTAEYSFFEGSTKYLAELVELNSFVKSCSFDINAKRTMYRDALDILGIKSGKTEEDIEKMIDNILQIDANGDKKLKKNNGLRNFIASNVIDSNRFKYLVRYGNPKKIRETAKCKPAVRFVLNEIPDAQIERYYEACCPKNTALCSANKRREKLADMIAEIKFENFSDAGNYQKANVTSRTSEAEIKRKNQAIIRLYLTVMYIMLKNLVNVNARYVIAFHCVERDTKLYAESGLEVGNIEKNKTNLTMAVIGVKLENGIIKTEFDKSLAENAANRYLRNARWYKLILDNLKKSERAVVNEFRNTVCHLNAIRNININIKEIKEVENYFALYHYLIQKHLENRFADKKVERDTGDFISKLEEHKTYCKDFVKAYCTPFGYNLVRYKNLTIDGLFDKNYPGKDDSDKQK

SEQ ID NO: 341 - protein, 918 aa, Unknown
  metagenome sequence
MAKKNKMKPRELREAQKKARQLKAAEINNNATPTIAAMPAAEVIAPAAEKKKSSVKAAGMKSILVSKNKMYITSFGKGNSAVLEYEVDNNDYNQTQLSSKNSSNIELRGVNEVNITFSSKHGFESGVEINTSNPTHRSGESSSVRGDMLGLKSELEKRFFGKTFDDNIHIQLIYNILDIEKILAVYVTNIVYALNNMLGEGDESNYDFMGYLSTFNTYKVFTNPNGSTLSDDKKENIRKSLSKFNALLKTKRLGYFGLEEPKTKDTRASEAYKKRVYHMLAIVGQIRQCVFHDKSGAKRFDLYSFINNIDPEYRETLDYLVDERFDSINKGFIQGNKVNISLLIDMMKGYEADDIIRLYYDFIVLKSQKNLGFSIKKLREKMLDEYGFRFKDKQYDSVRSKMYKIMDFLLFCNYYRNDVVAGEALVRKLRFSMTDDEKEGIYADEAAKLWGKFRNDFENIADHMNGDVIKELGKADMDFDEKILDSEKKNASDLLYFSKMIYMLTYFLDGKEINDLLTTLISKFDNIKEFLKIMKSSAVNVECELTVGYKLFNDSQRITNELFIVKNIASMRKPAASAKLTMFRDALTILGIDDKITDDRISEILKLKEKGKGIHGLRNFITNNVIESSRFVYLIKYANAQKIREVAKNEKVVMFVLGGIPDTQIERYYKSCVEFPDMNSSLEAKRSELARMIKNISFDDFKNVKQQAKGRENVAKERAKAVIGLYLTVMYLLVKNLVNVNARYVIAIHCLERDFGLYKEIIPELVSKNLKNDYRILSQTLCELCDKSPNLFLKKNERLRKCVEVDINNADSVMTRKYRNCIAHLTVVRELKEYIGDIRTVDSYFSIYHYVMQRCITKREDDTKQEEKIKYEDDLLKNHGYTKDFVKALNSPFGYNIPRFKNLSIEQLFDRNEYLTEK

SEQ ID NO: 342 - protein, 925 aa, Unknown
  metagenome sequence
MAKKNKMKPRELREAQKKARQLKAAEINNNAAPAIAAMPAVEVIAPAAEKKKSSVKAAGMKSILVSENKMYITSFGKGNSAVLEYEVDKMDNNNYNKTQLSSESSSNIKLCGVTKVNITFSSKHGFESGVEINTSNPTHRSGESSPVRWDMLGLKSELEKRFFGKTFDDNIHIQLIYNILDIEKILAVYVTNIVYALNNMLGVKGSESHDDFIGYLSTNNTYDVFIDPDNSSLSDDKKANVRKSLSKFNALLKTKRLGYFGLEEPKTKDNRVSEAYKKRVYHMLAIVGQIRQCVFHDKSGAKRFDLYSFINNIYPEYRETLDYLVDERFDSINKGFIQGNKVNISLLIDMMKGYEADDIIRLYYDFIVLKSQKNLGFSIKKLREKMLDEYGFRFKDKQYDSVRSKMYKLMDFLLFCNYYRNDVAAGEALVRKLRFSMTDDEKEGIYAGEAAKLWGKFRNDFENIADHMNGDVIKELGKADMDFDEKILDSEKKNASDLLYFSKMIYMLTYFLDGKEINDLLTTLISKFDNIKEFLKIMKSSAVDVECELTAGYKLFNDSQRITNELFIVKNIASMRKPAASAKLTMFRDALTILGIDDNITDDRISEILKLKEKGKGIHGLRNFITNNVIESSRFVYLIKYANAQKIREVAKNEKVVMFVLGGIPDTQIERYYKSCVEVPDMNSSLEAKRSELARMIKNIRFDDFKNVKQQAKGRENVAKERAKAVIGLYLTVMYLLVKNLVNVNARYVIAIHCLERDFGLYKEIIPELASKNLKNDYRILSQTLCELCDDRDKSPNLFLKKNKRLRKCVEVDINNADSSMTRKYRNCIAHLTVVRELKEYIGDIRTVDSYFSIYHYVMQRCITKRENDTKQEDKIKYEDDLLKNHGYTKDFVKALNSPFGYNIPRFKNLSIEQLFDRNEYLTEK

SEQ ID NO: 343 - protein, 954 aa, Unknown
  metagenome sequence
MGKKIHARDLREQRKTDRTEKFADQNKKREAERAVQKKDAAVSVKSVSSVSSKKDNVTKSMAKAAGVKSVFAVGNTVYMTSFGRGNDAVLEQKIVDTSHEPLNIDDPAYQLNVVTMNGYSVTGHRGETVSAVTDNPLRRFNGGKKDEPEQSVPTDMLCLKPTLEKKFFGKEFNDNIHIQLIYNILDIEKILAVYSTNAIYALNNMSADENIENSDFFMKRTTDETFDDFEKKKESTNSREKADFDAFEKFIGNYRLAYFADAFYVNKKNPKGKAKNVLREDKELYSVLTLIGKLRHWCVHSEEGRAEFWLYKLNELKDDFKNVLDVVYNRPVEEINNRFIENNKVNIQILGSVYKNTDIAELVRSYYEFLITKKYKNMGFSIKKLRESMLEGKGYADKEYDSVRNKLYQMTDFILYTGYINEDSDRADDLVNTLRSSLKEDDKTTVYCKEADYLWKKYRESIREVADALDGDNIKRLSKSNIEIQEDKLRKCFISYADSVSEFTKLIYLLTRFLSGKEINDLVTTLINKFDNIRSFLEIMDELGLDRTFTAEYSFFEGSTKYLAELVELNSFVKSCSFDINAKRTMYRDALDILGIKSGKTEEDIEKMIDNILQIDANGDKKLKKNNGLRNFIASNVIDSNRFKYLVRYGNPKKIRETAKCKPAVRFVLNEIPDAQIERYYEACCPKNTALCSANKRREKLADMIAEIKFENFSDAGNYQKANVTSKTHEAEIKRKNQAIIRLYLTVMYIMLKNLVNVNARYVIAFHCVERDTKLYAESGLEVGNIEKNKTNLTMAVMGVKLENGIIKTEFDKSLAENAANRYLRNARWYKLILDNLKKSERAVVNEFRNTVCHLNAIRNININIDGIKEVENYFALYHYLIQKHLENRFADKKVERDTGDFISKLEEHKTYCKDFVKAYCTPFGYNLVRYKNLTIDGLFDKNYPGKDDSDKQK

SEQ ID NO: 344 - protein, 925 aa, Unknown
  metagenome sequence
MAKKNKMKPRELREAQKKARQLKAAEINNNAAPAIAAMPAAEVIAPAAEKKKSSVKAAGMKSILVSKNKMYITSFGKGNSAVLEYEVDKVDNDNYNKTQLSSEDSSNIELCGVTKVNITFSSKHGLESGVEINTSNPTHRSGESSPVRWDMLGLKSELEKRFFGKTFDDNIHIQLIYNILDIEKILAVYVTNIVYALNNMLGVKGSESYDDFMGYLSAQNTYYIFTHPDKSNLSDKVKGNIKKSLSKFNDLLKTKRLGYFGLEEPKTKDTRVSQAYKKRVYHMLAIVGQIRQSVFHDKSSKLDEDLYSFINNIDPEYRETLDYLVDERFDSINKGFIQGNKVNISLLIDMMKGYEADDIIRLYYDFIVLKSQKNLGFSIKKLREKMLDEYGYRFKDKQYDSVRSKMYKLMDFLLFCNYYRNDVVAGEALVRKLRFSMTDDEKEGIYADEAAKLWGKFRNDFENIADHMNGDVIKELGKADMDFDEKILDSEKKNASDLLYFSKMIYMLTYFLDGKEINDLLTTLISKFDNIKEFLKIMKSSAVDVECELTVGYKLFNDSQRITNELFIVKNIASMRKPAASAKLTMLRDALTILGIDDKITDDRISEILKLKEKGKGIHGLRNFITNNVIESSRFVYLIKYANAQKIREVAENEKVVMFVLGGIPDTQIERYYKSCVEFPDMNSSLEAKRSELARMIKNIRFDDFKNVKQQANGRENVAKERAKAVIGLYLTVMYLLVKNLVNVNARYVIAIHCLERDFGLYKEIIPELASKNLKNDYRILSQTLCELCDDRDESPNLFLKKNKRLRKCVEVDINNADSSMTRKYRNCIAHLTVVRELKEYIGDIRTVDSYFSIYHYVMQRCITKREDDTKQEEKIKYEDDLLKNHGYTKDFVKALNSPFGYNIPRFKNLSIEQLFDRNEYLTEK

SEQ ID NO: 345 - protein, 921 aa, Unknown
  metagenome sequence
MAKKNKMKPRELREAQKKARQLKAAEINNNAAPAIAAMPAAEVIAPAAEKKKSSVKAAGMKSILVSENKMYITSFGKGNSAVLEYEVDNNDYNKTQLSSKDNSNIELGNVNEVNITFSSRRGFESGVEINTSNPTHRSGESSSVRGDMLGLKSELEKRFFGKTFDDNIHIQLIYNILDIEKILAVYVTNIVYALNNMLGEGDESNYDFMGYLSTFNTYKVFTNPNGSTLSDDKKENIRKSLSKFNVLLKTKRLGYFGLEEPKTKDNRVSEAYKKRVYHMLAIVGQIRQCVFHDKSGAKRFDLYSFINNIDPEYRDTLDYLVEERLKSINKDFIQGNKVNISLLIDMMKGYEADDIIRLYYDFIVLKSQKNLGFSIKKLREKMLEEYGFRFKDKQYDSVRSKMYKLMDFLLFCNYYRNDIAAGEALVRKLRFSMTDDEKEGIYAGEAAKLWGKFRNDFENIADHMNGDVIKELGKADMDFDEKILDSEKKNASDLLYFSKMIYMLTYFLDGKEINDLLTTLISKFDNIKEFLKIMKSSAVDVECELTAGYKLFNDSQRITNELFIVKNIASMRKPAASAKLTMFRDALTILGIDDNITDDRISEILKLKEKGKGIHGLRNFITNNVIESSRFVYLIKYANAQKIREVAKNEKVVMFVLGGIPDTQIERYYKSCVEVPDMNSSLEAKRSELARMIKNIRFDDFKNVKQQAKGRENVAKERAKAVIGLYLTVMYLLVKNLVNVNARYVIAIHCLERDFGLYKEIIPELASKNLKNDYRILSQTLCELCDDRDKSPNLFLKKNKRLRKCVEVDINNADSNMTRKYRNCIAHLTVVRELKEYIGDIRTVDSYFSIYHYVMQRRITKRKDDTKQEEKIKYEDDLLKNHGYTKDFVKALNSPFGYNIPRFKNLSIEQLFDRNEYLTEK

SEQ ID NO: 346 - protein, 941 aa, Unknown
  metagenome sequence
MAKKKRITAKERKQNHRESLMKKADSNAEKEKAKKPVVENKPDTAISKDNTPKPNKEIKKSKAKLAGVKWVIKANDDVAYISSFGKGNNSVLEKRIMGDVSSNVNKDSHMYVNPKYTKKNYEIKNGFSSGSSLVTYPNKPDKNSGMDALCLKPYFEKDFFGHIFTDNMHIQAIYNIFDIEKILAKHITNIIYTVNSFDRNYNQSGNDTIGFDINYRVPYSEYGGGKDSNGEPKNQSKWKKRKNFIKFYNKSKPHLGYYENIFYDHGEPISEEKFYNYLNILNFIRNNTFHYKDDDIELYSENYSEEFVFINCLNKFVKNKFKNVNKNFISNEKNNLYIILNAYGKDTENVEVVKKYSKELYKLSVLKTNKNLGVNVKKLRESAIEYGYCPLPYDKEKEVAKLSSVKHKLYKTYDFVITHYLNSNDKILLEIVEVLRLSKNDDEKENVYKKYAEKLFKADDVINPIKAISKLFAEKGNKLFKEKIIIKKEYIEDVSIDKNIYDFTKVIFFMTCFLDGKEINDLLTNIISKLQVIEDHNNVIKFISHNKDAVYKDYSDKYAIFRNAGKIATELEAIKSIARMENKIENAPQEPLLNDALLALGVSKTDLENTYNKYFDSKEKTDKQSQKVSTFLMNNVINNNRFKYVIKYINPADINGLAKNRYLVKFVLSKIPEEQIDSYYKLFSNEEEPSCEEKIKLLTKKISKLNFQTLFENNKIPNVEKERKKAIITLYFTIVYILVKNLVNINGLYTLALYFVERDRYFYKKICGKALRRKVGDKYDYLLLPEIFSGSKYREETKNLKLPKEKDRDIMKKYLPNDKDREGYNDFFTAYRNNIVHLNIIAKLSELTKNIDKDINSYFDIYHYCTQRVMFDYCKMNNNVVLAKMKDLAHIKSDCDEFSSKHTYPFSSAVLRFMNLPFAYNVPRFKNLSYKKFFDKQWLNH

SEQ ID NO: 347 - protein, 937 aa, Unknown
  metagenome sequence
MAKKKRITAKERKQNHRESLMKKADSNAEKEKAKKPVVENKPDTAISKDNTPKPNKEIKKSKAKLAGVKWVIKANDDVAYISSFGKGNNSVLEKRIMGDVSSNVNKDSHMYVNPKYTKKNYEIKNGFSSGSSLVTYPNKPDKNSGMDALCLKPYFEKDFFGHIFTDNMHIQAIYNIFDIEKILAKHITNIIYTVNSFDRNYNQSGNDTIGFDINYRVPYSEYGGGKDSNGEPKNQSKWKKRKNFIKFYNKSKPHLGYYENIFYDHGEPISEEKFYNYLNILNFIRNNTFHYKDDDIELYSENYSEEFVFINCLNKFVKNKFKNVNKNFISNEKNNLYIILNAYGKDTENVEVVKKYSKELYKLSVLKTNKNLGVNVKKLRESAIEYGYCPLPYDKEKEVAKLSSVKHKLYKTYDFVITHYLNSNDKILLEIVEVLRLSKNDDEKENVYKKYAEKLFKADDVINPIKAISKLFAEKGNKLFKEKIIIKKEYIEDVSIDKNIYDFTKVIFFMTCFLDGKEINDLLTNIISKLQVIEDHNNVIKFISHNKDAVYKDYSDKYAIFRNAGKIATELEAIKSIARMENKIENAPQEPLLNDALLALGVSKTDLENTYNKYFDSKEKTDKQSQKVSTFLMNNVINNNRFKYVIKYINPADINGLAKNRYLVKFVLSKIPEEQIDSYYKLFSNEEEPSCEEKIKLLTKKISKLNFQTLFENNKIPNVEKERKKAIITLYFTIVYILVKNLVNINGLYTLALYFVERDRYFYKKICGKALRRKVGDKYDYLLLPEIFSGSKYREETKNLKLPKEKDRDIMKKYLPNDKDREGYNDFFTAYRNNIVHLNIIAKLSELTKNIDKDINSYFDIYHYCTQRVMFDYCKMNNNVVLAKMKDLAHIKSDCDEFSSKHTYPFSSAVLRFMNLPFAYNVPRFKNLSYKKFFDKQ

SEQ ID NO: 348 - protein, 1023 aa, Unknown
  metagenome sequence
MAKKITAKQKREEKERLNKQKWAKNDSVIIVPETKEEIKTGEIQDNNRKRSRQKSQAKAMGLKAVLSFDNKIAIASFVSSKNAKSSHIERITDKEGTTISVNSKMFESSVNKRDINIEKRITIEEPQQDGTIKKEEKGVKSTTCNPYFKVGGKDYIGIKEIAEEHFFGRAFPNENLRVQIAYNIFDVQKILGTFVNNIIYSFYNLSRDEVQSDNDVIGMLYSISDYDRQKETETFLQAKSLLKQTEAYYAYFDDVFKKNKKPDKNKEGDNSKQYQENLRHNFNILRVLSFLRQICMHAEVHVSDDEGCARTQNYTDSLEALFNISKAFGKKMPELKTLIDNIYSKGINAINDEFVKNGKNNLYILSKVYPNEKREVLLREYYNFVVCKEGSNIGISTRKLKETMIAQNMPSLKEENTYRNKLYTVMNFILVRELKNCATIREQMIKELRANMDEEEGRDRIYSKYAKEIYLYVKDKLKLMLNVFKEEAEGIIIPGKEDPVKFSHGKLDKKEIESFCLTTKNTEDITKVIYFLCKFLDGKEINELCCAMMNKLDGISDLIETAKQCGEDVEFVDQFKCLSKCATMSNQIRIVKNISRMKKEMTIDNDTIFLDALELLGRKIEKYQKDKNGDYVKDEKGKKVYTKDYNNFQDMFFEGKNHRVRNFVSNNVIKSKWFSYVVRYNKPAECQALMRNSKLVKFALDELPDSQIEKYYISVFGEKSSSSNEEMRRELLKKLCDFSVRGFLDEIVLLSEDEMKQKDKFSEKEKKKSLIRLYLTIVYLITKSMVKINTRFSIACATYERDYILLCQSEKAERAWEKGATAFALTRKFLNHDKPTFEQYYTREREISAMPQEKRKELRKENDQLLKKTHYSKHAYCYIVDNVNNLTGAVANDNGRGLPCLSEKNDNANLFVEMRNKIVHLNVVHDMVKYINEIKNITSYYAFFCYVLQRMIIGNNSNEQNKFKAKYSKTLQEFGTYSKDLMWVLNLPFAYNLPRYKNLSNEQLFYDEEERMEKIVGRKNDSR

SEQ ID NO: 349 - protein, 922 aa, Unknown
  metagenome sequence
MAKKNKMKPRELREAQKKARQLKAAEINNNAAPAIAAMPAAEVIAPAAEKKKSSVKAAGMKSILVSENKMYITSFGKGNSAVLEYEVDNNDYNKTQLSSKDNSNIELGDVNEVNITFSSKHGFGSGMKINTSNPTHRSGESSPVRWDMLGLKSELEKRFFGKTFDDNIHIQLIYNILDIEKILAVYVTNIVYALNNMLGVKGSESHDDFIGYLSTNNIYDVFIDPDNSSLSDDKKANVRKSLSKFNVLLKTKRLGYFGLEEPKTKDNRVSEAYKKRVYHMLAIVGQIRQCVFHDKSGAKRFDLYSFINNIDPEYRDTLDYLVEERLKSINKDFIQGNKVNISLLIDMMKGYEADDIIRLYYDFIVLKSQKNLGFSIKKLREKMLEEYGFRFKDKQYDSVRSKMYKLMDFLLFCNYYRNDVVAGEALVRKLRFSMTDDEKEGIYADEAAKLWGKFRNDFENIADHMNGDVIKELGKADMDFDEKILDSEKKNASDLLYFSKMIYMLTYFLDGKEINDLLTTLISKFDNIKEFLKIMKSSAVDVECELTAGYKLFNDSQRITNELFIVKNIASMRKPAASAKLTMFRDALTILGIDDNITDDRISEILKLKEKGKGIHGLRNFITNNVIESSRFVYLIKYANAQKIREVAKNEKVVMFVLGGIPDTQIERYYKSCVEFPDMNSSLEAKRSELARMIKNISFDDFKNVKQQAKGRENVAKERAKAVIGLYLTVMYLLVKNLVNVNARYVIAIHCLERDFGLYKEIIPELASKNLKNDYRILSQTLCELCDDRDESPNLFLKKNKRLRKCVEVDINNADSSMTRKYRNCIAHLTVVRELKEYIGDIRTVDSYFSIYHYVMQRCITKRENDTKQEEKIKYEDDLLKNHGYTKDFVKALNSPFGYNIPRFKNLSIEQLFDRNEYLTEK

SEQ ID NO: 350 - protein, 880 aa, Unknown
  uncultured Clostridiales bacterium sequence
MAKKKRMSAKERKQQQINLRIKKATEDSTKKVNTTVAVNNKPISKEIKKSKAKLAGVKWVIKANDDVAYISSFGKGNNSVLEKRIIGDVSSDVNKDSHMYVNPKYTKKNYEIKNGFSSGSSLTTHPNKPDKNSGMDALCLKTYFEKEIFKDKFNDNMHIQAIYNIFDIEKTLAKHITNIIYAVNSLDRSYIQSGNDTIGFGLNFNIPYAEYGGGKDSNGKPENKSAWEKRESFIKFYNNAKDRFGYFESVFYQNGKQISEEKFYIYLNILNFVRNSTFHYNNTSSHLYKERYCKINPKNNLKTDFEFVSYLNEFVKNKFKNVNKNFISNEKNNLYIILNAYGEDIEDVEVVKKYSKELYKLSVLKTNKNLGVNVKKLRESAIEYGYCPLPYDKEKEVAKLSSIKHKLYKTYDFVITHYLNSNDKLLLEIVEALRLSKNDDKKENVYKIYAEKIFKAEYVINPIKTISNLFAEKGDKLFNEKVSISEEYVEDIRIDKNIHNFTKVIFFLTCFLDGKEINDLLTNIISKLQVIEDHNNVIKAIANNNDAVYKDYSDKYAVFKNSGKIATELEAIKSIARMENKINKAFKEPLLKDAMLALGVSPNDLDEKYEKYFKTDVDADKDHQKVSTFLMNNVINNSRFKYVVKYINPADINRLAKNKHLVKFVLDQIPHKQIDSYYNSVSTVEEPSYKGKIQLLTKKITGLNFYSLFENCKIPNVEKEKKKAVITLYFTIIYILVKNLVNINGLYTLALYFVERDGFFYKKICEKKDKKKTNKDVDYLLLPEIFSGSKYREETKNLKLPKEKDREIMKKYLPNDEDRKEYNKFFKQYRNNIVHLNIIANLSKLTSTIDKEINSYFEIFHYCAQRVMFDYCKNNNKVVL

SEQ ID NO: 351 - DNA, 31 bp, Unknown
  Direct repeat nucleotide sequence
gaactacactctggctgaaagtcagggtcta

SEQ ID NO: 352 - DNA, 36 bp, Unknown
  Direct repeat nucleotide sequence
ctactatactagtgtgattttacactagtctaaaac

SEQ ID NO: 353 - DNA, 51 bp, Unknown
  Direct repeat nucleotide sequence
tctcttggcggaaagaaaacagaaagacgaagaacaggacaaatggctatc

SEQ ID NO: 354 - DNA, 36 bp, Unknown
  Direct repeat nucleotide sequence
gaactatagtagtgtgaatttacactactctaaaac

SEQ ID NO: 355 - DNA, 36 bp, Unknown; identical to SEQ ID NO: 354
  Direct repeat nucleotide sequence

SEQ ID NO: 356 - DNA, 25 bp, Unknown
  Direct repeat nucleotide sequence
gtgcgaatttgcgctagtctaaaac

SEQ ID NO: 357 - DNA, 37 bp, Unknown
  Direct repeat nucleotide sequence
caactacaaccccgtaaaaatacggggttctgaaacc

SEQ ID NO: 358 - DNA, 38 bp, Unknown
  Direct repeat nucleotide sequence
cagcactacacccccctgaaacatgaggggtctaaaac

SEQ ID NO: 359 - DNA, 38 bp, Unknown
  Direct repeat nucleotide sequence
tagcactacacccccctgaaacatgaggggtctaaaac

SEQ ID NO: 360 - DNA, 38 bp, Unknown; identical to SEQ ID NO: 359
  Direct repeat nucleotide sequence

SEQ ID NO: 361 - DNA, 37 bp, Unknown
  Direct repeat nucleotide sequence
ctactacactggtgcgaatttgcactagtctaaaacc

SEQ ID NO: 362 - DNA, 38 bp, Unknown; identical to SEQ ID NO: 358
  Direct repeat nucleotide sequence

SEQ ID NO: 363 - DNA, 38 bp, Unknown; identical to SEQ ID NO: 358
  Direct repeat nucleotide sequence

SEQ ID NO: 364 - DNA, 38 bp, Unknown; identical to SEQ ID NO: 358
  Direct repeat nucleotide sequence

SEQ ID NO: 365 - DNA, 22 bp, Unknown
  Direct repeat nucleotide sequence
tactggtgcgaatttgcactaa

SEQ ID NO: 366 - DNA, 22 bp, Unknown
  Direct repeat nucleotide sequence
tactggtgcgaatttgcactaa

SEQ ID NO: 367 - DNA, 24 bp, Unknown
  Direct repeat nucleotide sequence
gtgcgaatttgcgctagtctaaaa

SEQ ID NO: 368 - DNA, 37 bp, Unknown
  Direct repeat nucleotide sequence
ctactatactggtgcgaatttgcactagtctaaaatg

SEQ ID NO: 369 - DNA, 37 bp, Unknown; identical to SEQ ID NO: 368
  Direct repeat nucleotide sequence

SEQ ID NO: 370 - DNA, 37 bp, Unknown; identical to SEQ ID NO: 368
  Direct repeat nucleotide sequence

SEQ ID NO: 371 - DNA, 29 bp, Unknown
  Direct repeat nucleotide sequence
cttatacaacacccattttcacagtgggt

SEQ ID NO: 372 - DNA, 36 bp, Unknown
  Direct repeat nucleotide sequence
gtttgagagtagtgtaattttatagggtagtaaaac

SEQ ID NO: 373 - DNA, 36 bp, Unknown; identical to SEQ ID NO: 372
  Direct repeat nucleotide sequence

SEQ ID NO: 374 - DNA, 26 bp, Unknown
  Direct repeat nucleotide sequence
gaactatagtagtgtttttttacact

SEQ ID NO: 375 - DNA, 36 bp, Unknown
  Direct repeat nucleotide sequence
gtactacacccctgcagttttgcaggggtctgaaac

SEQ ID NO: 376 - DNA, 36 bp, Unknown
  Direct repeat nucleotide sequence
ctactatactggtgcgattttgcactagtctaaaac

SEQ ID NO: 377 - DNA, 27 bp, Unknown
  Direct repeat nucleotide sequence
ctactacactggtgcaaatttgcacta

SEQ ID NO: 378 - DNA, 25 bp, Unknown
  Direct repeat nucleotide sequence
gtgcgaatttgcactagtctaaaac

SEQ ID NO: 379 - DNA, 36 bp, Unknown; identical to SEQ ID NO: 376
  Direct repeat nucleotide sequence

SEQ ID NO: 380 - DNA, 36 bp, Unknown; identical to SEQ ID NO: 376
  Direct repeat nucleotide sequence

SEQ ID NO: 381 - DNA, 28 bp, Unknown
  Direct repeat nucleotide sequence
ctactacactggtgcgaatttgcactag

SEQ ID NO: 382 - DNA, 36 bp, Unknown
  Direct repeat nucleotide sequence
gattgaaaggattgtaaatttgcaaggtcttaaaac

SEQ ID NO: 383 - DNA, 36 bp, Unknown; identical to SEQ ID NO: 382
  Direct repeat nucleotide sequence

SEQ ID NO: 384 - DNA, 37 bp, Unknown
  Direct repeat nucleotide sequence
ctactacactggtgcgattttgcactagtctaaaact

SEQ ID NO: 385 - DNA, 36 bp, Unknown
  Direct repeat nucleotide sequence
gattgaaaggattgtaaatttacaaggtcttaaaac

SEQ ID NO: 386 - DNA, 36 bp, Unknown; identical to SEQ ID NO: 385
  Direct repeat nucleotide sequence

SEQ ID NO: 387 - DNA, 37 bp, Unknown; identical to SEQ ID NO: 384
  Direct repeat nucleotide sequence

SEQ ID NO: 388 - DNA, 21 bp, Unknown
  Direct repeat nucleotide sequence
gattgaatggattgtaaattt

SEQ ID NO: 389 - DNA, 21 bp, Unknown
  Direct repeat nucleotide sequence
gattgaatggattgtaaattt

SEQ ID NO: 390 - DNA, 29 bp, Unknown
  Direct repeat nucleotide sequence
actggtgcaaatttgcactagtctaaaac

SEQ ID NO: 391 - DNA, 51 bp, Unknown; identical to SEQ ID NO: 353
  Direct repeat nucleotide sequence

SEQ ID NO: 392 - DNA, 21 bp, Unknown
  Direct repeat nucleotide sequence
ggaggtgataaaaatgggaaa

SEQ ID NO: 393 - DNA, 36 bp, Unknown; identical to SEQ ID NO: 376
  Direct repeat nucleotide sequence

SEQ ID NO: 394 - DNA, 37 bp, Unknown
  Direct repeat nucleotide sequence
gctactacactggtgcgaatttgcactagtctaaaac

SEQ ID NO: 395 - DNA, 37 bp, Unknown; identical to SEQ ID NO: 394
  Direct repeat nucleotide sequence

SEQ ID NO: 396 - DNA, 36 bp, Unknown; identical to SEQ ID NO: 376
  Direct repeat nucleotide sequence

SEQ ID NO: 397 - DNA, 36 bp, Unknown; identical to SEQ ID NO: 376
  Direct repeat nucleotide sequence

SEQ ID NO: 398 - DNA, 28 bp, Unknown
  Direct repeat nucleotide sequence
ctactacactggtgcgaatttgcactag

SEQ ID NO: 399 - DNA, 21 bp, Unknown
  Direct repeat nucleotide sequence
ggaggtgataaaaatgggaaa

SEQ ID NO: 400 - DNA, 36 bp, Unknown; identical to SEQ ID NO: 376
  Direct repeat nucleotide sequence

SEQ ID NO: 401 - DNA, 37 bp, Unknown; identical to SEQ ID NO: 368
  Direct repeat nucleotide sequence

SEQ ID NO: 402 - DNA, 29 bp, Unknown
  Direct repeat nucleotide sequence
actggtgcaaatttgcactagtctaaaac

SEQ ID NO: 403 - DNA, 37 bp, Unknown; identical to SEQ ID NO: 384
  Direct repeat nucleotide sequence

SEQ ID NO: 404 - DNA, 28 bp, Unknown
  Direct repeat nucleotide sequence
ctactacactggtgcgaatttgcactag

SEQ ID NO: 405 - DNA, 36 bp, Unknown; identical to SEQ ID NO: 376
  Direct repeat nucleotide sequence

SEQ ID NO: 406 - DNA, 25 bp, Unknown
  Direct repeat nucleotide sequence
gtgcgaatttgcactagtctaaaac

SEQ ID NO: 407 - DNA, 21 bp, Unknown
  Direct repeat nucleotide sequence
gaatttgcactagtctaaaac

SEQ ID NO: 408 - DNA, 40 bp, Unknown
  Direct repeat nucleotide sequence
ggaggtgataaaaatgggaaagacgatccttacggctatc

SEQ ID NO: 409 - DNA, 25 bp, Unknown
  Direct repeat nucleotide sequence
gtgcgaatttgcgctagtctaaaac

SEQ ID NO: 410 - DNA, 37 bp, Unknown; identical to SEQ ID NO: 368
  Direct repeat nucleotide sequence

SEQ ID NO: 411 - DNA, 33 bp, Unknown
  Direct repeat nucleotide sequence
ctacactagtgcgaatttgcactagtctaaaac

SEQ ID NO: 412 - DNA, 28 bp, Unknown
  Direct repeat nucleotide sequence
ctggtgcgaatttgcactagtctaaaac

SEQ ID NO: 413 - DNA, 28 bp, Unknown
  Direct repeat nucleotide sequence
ctggtgcgaatttgcactagtctaaaac

SEQ ID NO: 414 - DNA, 27 bp, Unknown
  Direct repeat nucleotide sequence
ctactacactggtgcaaatttgcacta

SEQ ID NO: 415 - DNA, 25 bp, Unknown
  Direct repeat nucleotide sequence
gtgcgaatttgcgctagtctaaaac

SEQ ID NO: 416 - DNA, 28 bp, Unknown
  Direct repeat nucleotide sequence
cctactacactggtgcgaatttgcacta

SEQ ID NO: 417 - DNA, 27 bp, Unknown
  Direct repeat nucleotide sequence
ctactacactggtgcgaatttgcacta

SEQ ID NO: 418 - DNA, 21 bp, Unknown
  Direct repeat nucleotide sequence
ggaggtgataaaaatgggaaa

SEQ ID NO: 419 - DNA, 37 bp, Unknown
  Direct repeat nucleotide sequence
ctactacactggtgcgaatttgcactagtctaaaact

SEQ ID NO: 420 - DNA, 28 bp, Unknown
  Direct repeat nucleotide sequence
ctactacactggtgcgaatttgcactag

SEQ ID NO: 421 - DNA, 51 bp, Unknown; identical to SEQ ID NO: 353
  Direct repeat nucleotide sequence

SEQ ID NO: 422 - DNA, 37 bp, Unknown; identical to SEQ ID NO: 419
  Direct repeat nucleotide sequence

SEQ ID NO: 423 - DNA, 29 bp, Unknown
  Direct repeat nucleotide sequence
actggtgcgattttgcactagtctaaaac

SEQ ID NO: 424 - DNA, 44 bp, Unknown
  Direct repeat nucleotide sequence
gctgaaagaaaacagaaagacgaggagcaggacaaatggctttc

SEQ ID NO: 425 - DNA, 21 bp, Unknown
  Direct repeat nucleotide sequence
gattttgcactagtctaaaac

SEQ ID NO: 426 - DNA, 37 bp, Unknown; identical to SEQ ID NO: 394
  Direct repeat nucleotide sequence

SEQ ID NO: 427 - DNA, 36 bp, Unknown; identical to SEQ ID NO: 376
  Direct repeat nucleotide sequence

SEQ ID NO: 428 - DNA, 36 bp, Unknown; identical to SEQ ID NO: 376
  Direct repeat nucleotide sequence

SEQ ID NO: 429 - DNA, 36 bp, Unknown; identical to SEQ ID NO: 376
  Direct repeat nucleotide sequence

SEQ ID NO: 430 - DNA, 40 bp, Unknown; identical to SEQ ID NO: 408
  Direct repeat nucleotide sequence

SEQ ID NO: 431 - DNA, 37 bp, Unknown; identical to SEQ ID NO: 384
  Direct repeat nucleotide sequence

SEQ ID NO: 432 - DNA, 36 bp, Unknown; identical to SEQ ID NO: 376
  Direct repeat nucleotide sequence

SEQ ID NO: 433 - DNA, 21 bp, Unknown
  Direct repeat nucleotide sequence
ggaggtgataaaaatgggaaa

SEQ ID NO: 434 - DNA, 22 bp, Unknown
  Direct repeat nucleotide sequence
ctactacactggtgcgaatttg

SEQ ID NO: 435 - DNA, 21 bp, Unknown
  Direct repeat nucleotide sequence
ggaggtgataaaaatgggaaa

SEQ ID NO: 436 - DNA, 21 bp, Unknown
  Direct repeat nucleotide sequence
ggaggtgataaaaatgggaaa

SEQ ID NO: 437 - DNA, 18 bp, Unknown
  Direct repeat nucleotide sequence
tttgcactagtctaaaac

SEQ ID NO: 438 - DNA, 33 bp, Unknown
  Direct repeat nucleotide sequence
gttttagtatccacgataaacgtggattgtagt

SEQ ID NO: 439 - DNA, 36 bp, Unknown
  Direct repeat nucleotide sequence
gattgaaagctatgcgaatttgcacagtcttaaaac

SEQ ID NO: 440 - DNA, 37 bp, Unknown
  Direct repeat nucleotide sequence
ctactacactagtgcaaatttgcgctagtctaaaact

SEQ ID NO: 441 - DNA, 27 bp, Unknown
  Direct repeat nucleotide sequence
ctactacactagtgcgaatttgcacta

SEQ ID NO: 442 - DNA, 35 bp, Unknown
  Direct repeat nucleotide sequence
ctactacactggtgcgattttgcactagtctaaaa

SEQ ID NO: 443 - DNA, 21 bp, Unknown
  Direct repeat nucleotide sequence
ttttgcactagtctaaaactt

SEQ ID NO: 444 - DNA, 29 bp, Unknown
  Direct repeat nucleotide sequence
actggtgcgattttgcactagtctaaaac

SEQ ID NO: 445 - DNA, 44 bp, Unknown; identical to SEQ ID NO: 424
  Direct repeat nucleotide sequence

SEQ ID NO: 446 - DNA, 36 bp, Unknown
  Direct repeat nucleotide sequence
gtactaaagcccgctagtatagacgggttctaagac

SEQ ID NO: 447 - DNA, 26 bp, Unknown
  Direct repeat nucleotide sequence
ggtgcgattttgcactagtctaaaac

SEQ ID NO: 448 - DNA, 26 bp, Unknown
  Direct repeat nucleotide sequence
ggtgcgattttgcactagtctaaaac

SEQ ID NO: 449 - DNA, 37 bp, Unknown
  Direct repeat nucleotide sequence
tgaactacacccgtgcaaaattgcaggggtctaaaac

SEQ ID NO: 450 - DNA, 44 bp, Unknown; identical to SEQ ID NO: 424
  Direct repeat nucleotide sequence

SEQ ID NO: 451 - DNA, 36 bp, Unknown; identical to SEQ ID NO: 376
  Direct repeat nucleotide sequence

SEQ ID NO: 452 - DNA, 37 bp, Unknown; identical to SEQ ID NO: 449
  Direct repeat nucleotide sequence

SEQ ID NO: 453 - DNA, 33 bp, Unknown
  Direct repeat nucleotide sequence
ctacactggtgcgagtttgcactagtctaaaac

SEQ ID NO: 454 - DNA, 27 bp, Unknown
  Direct repeat nucleotide sequence
ctactacactagtgcgaatttgcacta

SEQ ID NO: 455 - DNA, 37 bp, Unknown; identical to SEQ ID NO: 368
  Direct repeat nucleotide sequence

SEQ ID NO: 456 - DNA, 27 bp, Unknown
  Direct repeat nucleotide sequence
ctactacactagtgcgaatttgcacta

SEQ ID NO: 457 - DNA, 33 bp, Unknown; identical to SEQ ID NO: 411
  Direct repeat nucleotide sequence

SEQ ID NO: 458 - DNA, 44 bp, Unknown; identical to SEQ ID NO: 424
  Direct repeat nucleotide sequence

SEQ ID NO: 459 - DNA, 36 bp, Unknown
  Direct repeat nucleotide sequence
ctactacactggtgcgattttgcactagtctaaaac

SEQ ID NO: 460 - DNA, 27 bp, Unknown
  Direct repeat nucleotide sequence
ctactacactagtgcgaatttgcacta

SEQ ID NO: 461 - DNA, 21 bp, Unknown
  Direct repeat nucleotide sequence
ggaggtgataaaaatgggaaa

SEQ ID NO: 462 - DNA, 35 bp, Unknown; identical to SEQ ID NO: 442
  Direct repeat nucleotide sequence

SEQ ID NO: 463 - DNA, 36 bp, Unknown; identical to SEQ ID NO: 459
  Direct repeat nucleotide sequence

SEQ ID NO: 464 - DNA, 37 bp, Unknown; identical to SEQ ID NO: 449
  Direct repeat nucleotide sequence

SEQ ID NO: 465 - DNA, 37 bp, Unknown; identical to SEQ ID NO: 368
  Direct repeat nucleotide sequence

SEQ ID NO: 466 - DNA, 37 bp, Unknown; identical to SEQ ID NO: 419
  Direct repeat nucleotide sequence

SEQ ID NO: 467 - DNA, 33 bp, Unknown; identical to SEQ ID NO: 411
  Direct repeat nucleotide sequence

SEQ ID NO: 468 - DNA, 33 bp, Unknown; identical to SEQ ID NO: 453
  Direct repeat nucleotide sequence

SEQ ID NO: 469 - DNA, 33 bp, Unknown; identical to SEQ ID NO: 453
  Direct repeat nucleotide sequence

SEQ ID NO: 470 - DNA, 37 bp, Unknown; identical to SEQ ID NO: 368
  Direct repeat nucleotide sequence

SEQ ID NO: 471 - DNA, 37 bp, Unknown; identical to SEQ ID NO: 368
  Direct repeat nucleotide sequence

SEQ ID NO: 472 - DNA, 25 bp, Unknown
  Direct repeat nucleotide sequence
gtgcgaatttgcactagtctaaaac

SEQ ID NO: 473 - DNA, 28 bp, Unknown
  Direct repeat nucleotide sequence
ctactacactggtgcgaatttgcactag

SEQ ID NO: 474 - DNA, 37 bp, Unknown; identical to SEQ ID NO: 449
  Direct repeat nucleotide sequence

SEQ ID NO: 475 - DNA, 21 bp, Unknown
  Direct repeat nucleotide sequence
ggaggtgataaaaatgggaaa

SEQ ID NO: 476 - DNA, 33 bp, Unknown; identical to SEQ ID NO: 453
  Direct repeat nucleotide sequence

SEQ ID NO: 477 - DNA, 51 bp, Unknown; identical to SEQ ID NO: 353
  Direct repeat nucleotide sequence

SEQ ID NO: 478 - DNA, 26 bp, Unknown
  Direct repeat nucleotide sequence
ggtgcgattttgcactagtctaaaac

SEQ ID NO: 479 - DNA, 27 bp, Unknown
  Direct repeat nucleotide sequence
ctactatactggtgcgattttgcacta

SEQ ID NO: 480 - DNA, 36 bp, Unknown; identical to SEQ ID NO: 446
  Direct repeat nucleotide sequence

SEQ ID NO: 481 - DNA, 29 bp, Unknown
  Direct repeat nucleotide sequence
actggtgcgattttgcactagtctaaaac

SEQ ID NO: 482 - DNA, 36 bp, Unknown; identical to SEQ ID NO: 459
  Direct repeat nucleotide sequence

SEQ ID NO: 483 - DNA, 21 bp, Unknown
  Direct repeat nucleotide sequence
ggaggtgataaaaatgggaaa

SEQ ID NO: 484 - DNA, 21 bp, Unknown
  Direct repeat nucleotide sequence
ggaggtgataaaaatgggaaa

SEQ ID NO: 485 - DNA, 25 bp, Unknown
  Direct repeat nucleotide sequence
gtgcgaatttgcactagtctaaaac

SEQ ID NO: 486 - DNA, 28 bp, Unknown
  Direct repeat nucleotide sequence
ctactacactggtgcgaatttgcactag

SEQ ID NO: 487 - DNA, 25 bp, Unknown
  Direct repeat nucleotide sequence
ctactacactggtgtgaatttgcac

SEQ ID NO: 488 - DNA, 25 bp, Unknown
  Direct repeat nucleotide sequence
gtgcgaatttgcgctagtctaaaac

SEQ ID NO: 489 - DNA, 37 bp, Unknown; identical to SEQ ID NO: 384
  Direct repeat nucleotide sequence

SEQ ID NO: 490 - DNA, 37 bp, Unknown; identical to SEQ ID NO: 368
  Direct repeat nucleotide sequence

SEQ ID NO: 491 - DNA, 36 bp, Unknown
  Direct repeat nucleotide sequence
gccccttgaccttacgaaatggtaaggttccaaaac

SEQ ID NO: 492 - DNA, 36 bp, Unknown; identical to SEQ ID NO: 376
  Direct repeat nucleotide sequence

SEQ ID NO: 493 - DNA, 21 bp, Unknown
  Direct repeat nucleotide sequence
gattgaaaggattgtaaattt

SEQ ID NO: 494 - DNA, 21 bp, Unknown
  Direct repeat nucleotide sequence
gattgaaaggattgtaaattt

SEQ ID NO: 495 - DNA, 36 bp, Unknown; identical to SEQ ID NO: 376
  Direct repeat nucleotide sequence

SEQ ID NO: 496 - DNA, 37 bp, Unknown; identical to SEQ ID NO: 368
  Direct repeat nucleotide sequence

SEQ ID NO: 497 - DNA, 36 bp, Unknown
  Direct repeat nucleotide sequence
gattgaaaggtttgtaaatttacaaggtcttaaaac

SEQ ID NO: 498 - DNA, 22 bp, Unknown
  Direct repeat nucleotide sequence
tactggtgcgaatttgcactaa

SEQ ID NO: 499 - DNA, 22 bp, Unknown
  Direct repeat nucleotide sequence
tactggtgcgaatttgcactaa

SEQ ID NO: 500 - DNA, 37 bp, Unknown
  Direct repeat nucleotide sequence
gattgaaaggattgtaaatttacaaggtcttaaaaca

SEQ ID NO: 501 - DNA, 37 bp, Unknown; identical to SEQ ID NO: 500
  Direct repeat nucleotide sequence

SEQ ID NO: 502 - DNA, 50 bp, Unknown
  Direct repeat nucleotide sequence
gaaagaaaacaaaaagacgagaacaggacaaatggctttctgagcaggct

SEQ ID NO: 503 - DNA, 37 bp, Unknown
  Direct repeat nucleotide sequence
gctactatactggtgcgaatttgcactagtctaaaac

SEQ ID NO: 504 - DNA, 19 bp, Unknown
  Direct repeat nucleotide sequence
actatagccctgccggaaa

SEQ ID NO: 505 - DNA, 19 bp, Unknown
  Direct repeat nucleotide sequence
actatagccctgccggaaa

SEQ ID NO: 506 - DNA, 44 bp, Unknown; identical to SEQ ID NO: 424
  Direct repeat nucleotide sequence

SEQ ID NO: 507 - DNA, 37 bp, Unknown; identical to SEQ ID NO: 384
  Direct repeat nucleotide sequence

SEQ ID NO: 508 - DNA, 36 bp, Unknown; identical to SEQ ID NO: 382
  Direct repeat nucleotide sequence

SEQ ID NO: 509 - DNA, 36 bp, Unknown
  Direct repeat nucleotide sequence
gtacaatagccctctcgtagttgagggctctgagac

SEQ ID NO: 510 - DNA, 36 bp, Unknown; identical to SEQ ID NO: 509
  Direct repeat nucleotide sequence

SEQ ID NO: 511 - DNA, 26 bp, Unknown
  Direct repeat nucleotide sequence
gaactacacccgtgcaaaattgcagg

SEQ ID NO: 512 - DNA, 28 bp, Unknown
  Direct repeat nucleotide sequence
ctactacactggtgcgaatttgcactag

SEQ ID NO: 513 - DNA, 28 bp, Unknown
  Direct repeat nucleotide sequence
ctactacactggtgcgaatttgcactag

SEQ ID NO: 514 - DNA, 25 bp, Unknown
  Direct repeat nucleotide sequence
gtgcgaatttgcgctagtctaaaac

SEQ ID NO: 515 - DNA, 25 bp, Unknown
  Direct repeat nucleotide sequence
gtgcgattttgcactagtctaaaac

SEQ ID NO: 516 - DNA, 25 bp, Unknown
  Direct repeat nucleotide sequence
gtgcgattttgcactagtctaaaac

SEQ ID NO: 517 - DNA, 25 bp, Unknown
  Direct repeat nucleotide sequence
gcactacacccccctgaaacatgag

SEQ ID NO: 518 - DNA, 27 bp, Unknown
  Direct repeat nucleotide sequence
ctactacactagtgcgaatttgcacta

SEQ ID NO: 519 - DNA, 33 bp, Unknown; identical to SEQ ID NO: 453
  Direct repeat nucleotide sequence

SEQ ID NO: 520 - DNA, 28 bp, Unknown
  Direct repeat nucleotide sequence
ctactacactggtgcgaatttgcactag

SEQ ID NO: 521 - DNA, 26 bp, Unknown
  Direct repeat nucleotide sequence
ggtgcgattttgcactagtctaaaac

SEQ ID NO: 522 - DNA, 36 bp, Unknown; identical to SEQ ID NO: 446
  Direct repeat nucleotide sequence

SEQ ID NO: 523 - DNA, 33 bp, Unknown; identical to SEQ ID NO: 453
  Direct repeat nucleotide sequence

SEQ ID NO: 524 - DNA, 21 bp, Unknown
  Direct repeat nucleotide sequence
ggaggtgataaaaatgggaaa

SEQ ID NO: 525 - DNA, 28 bp, Unknown
  Direct repeat nucleotide sequence
ctactacactggtgcgaatttgcactag

SEQ ID NO: 526 - DNA, 25 bp, Unknown
  Direct repeat nucleotide sequence
gtgcgaatttgcgctagtctaaaac

SEQ ID NO: 527 - DNA, 21 bp, Unknown
  Direct repeat nucleotide sequence
ggaggtgataaaaatgggaaa

SEQ ID NO: 528 - DNA, 50 bp, Unknown; identical to SEQ ID NO: 502
  Direct repeat nucleotide sequence

SEQ ID NO: 529 - DNA, 20 bp, Unknown
  Direct repeat nucleotide sequence
gacgggaggtgatgaaaatg

SEQ ID NO: 530 - DNA, 37 bp, Unknown; identical to SEQ ID NO: 368
  Direct repeat nucleotide sequence

SEQ ID NO: 531 - DNA, 36 bp, Unknown; identical to SEQ ID NO: 376
  Direct repeat nucleotide sequence

SEQ ID NO: 532 - DNA, 51 bp, Unknown; identical to SEQ ID NO: 353
  Direct repeat nucleotide sequence

SEQ ID NO: 533 - DNA, 26 bp, Unknown
  Direct repeat nucleotide sequence
ggtgcgattttgcactagtctaaaac

SEQ ID NO: 534 - DNA, 21 bp, Unknown
  Direct repeat nucleotide sequence
ggaggtgataaaaatgggaaa

SEQ ID NO: 535 - DNA, 44 bp, Unknown; identical to SEQ ID NO: 424
  Direct repeat nucleotide sequence

SEQ ID NO: 536 - DNA, 29 bp, Unknown
  Direct repeat nucleotide sequence
ctagtgcaaatttgcactagtctaaaacg

SEQ ID NO: 537 - DNA, 22 bp, Unknown
  Direct repeat nucleotide sequence
tactggtgcgaatttgcactaa

SEQ ID NO: 538 - DNA, 44 bp, Unknown; identical to SEQ ID NO: 424
  Direct repeat nucleotide sequence

SEQ ID NO: 539 - DNA, 27 bp, Unknown
  Direct repeat nucleotide sequence
ctactacactggtgcgaatttgcacta

SEQ ID NO: 540 - DNA, 36 bp, Unknown; identical to SEQ ID NO: 376
  Direct repeat nucleotide sequence

SEQ ID NO: 541 - DNA, 21 bp, Unknown
  Direct repeat nucleotide sequence
ggaggtgataaaaatgggaaa

SEQ ID NO: 542 - DNA, 38 bp, Unknown
  Direct repeat nucleotide sequence
cctactacactagtgcgaatttgcactagtctaaaact

SEQ ID NO: 543 - DNA, 21 bp, Unknown
  Direct repeat nucleotide sequence
ggaggtgataaaaatgggaaa

SEQ ID NO: 544 - DNA, 27 bp, Unknown
  Direct repeat nucleotide sequence
ctactacactggtgcgaatttgcacta

SEQ ID NO: 545 - DNA, 29 bp, Unknown
  Direct repeat nucleotide sequence
ctagtgcaaatttgcactagtctaaaacg

SEQ ID NO: 546 - DNA, 25 bp, Unknown
  Direct repeat nucleotide sequence
gtgcgaatttgcactagtctaaaac

SEQ ID NO: 547 - DNA, 38 bp, Unknown
  Direct repeat nucleotide sequence
ctactacactagtgcgaatttgcactagtctaaaacta

SEQ ID NO: 548 - DNA, 21 bp, Unknown
  Direct repeat nucleotide sequence
ggaggtgataaaaatgggaaa

SEQ ID NO: 549 - DNA, 44 bp, Unknown; identical to SEQ ID NO: 424
  Direct repeat nucleotide sequence

SEQ ID NO: 550 - DNA, 28 bp, Unknown
  Direct repeat nucleotide sequence
ctactacactggtgcgaatttgcactag

SEQ ID NO: 551 - DNA, 51 bp, Unknown; identical to SEQ ID NO: 353
  Direct repeat nucleotide sequence

SEQ ID NO: 552 - DNA, 27 bp, Unknown
  Direct repeat nucleotide sequence
ctactacactggtgcgaatttgcacta

SEQ ID NO: 553 - DNA, 25 bp, Unknown
  Direct repeat nucleotide sequence
gtgcgaatttgcactagtctaaaac

SEQ ID NO: 554 - DNA, 22 bp, Unknown
  Direct repeat nucleotide sequence
tactggtgcgaatttgcactaa

SEQ ID NO: 555 - DNA, 22 bp, Unknown
  Direct repeat nucleotide sequence
tactggtgcgaatttgcactaa

SEQ ID NO: 556 - DNA, 22 bp, Unknown
  Direct repeat nucleotide sequence
tactggtgcgaatttgcactaa

SEQ ID NO: 557 - DNA, 27 bp, Unknown
  Direct repeat nucleotide sequence
ctactacactggtgcaaatttgcacta

SEQ ID NO: 558 - DNA, 36 bp, Unknown
  Direct repeat nucleotide sequence
catgtaaacccctaacaaatggtaggggtttgaaac

SEQ ID NO: 559 - DNA, 36 bp, Unknown; identical to SEQ ID NO: 558
  Direct repeat nucleotide sequence

SEQ ID NO: 560 - DNA, 36 bp, Unknown; identical to SEQ ID NO: 558
  Direct repeat nucleotide sequence

SEQ ID NO: 561 - DNA, 36 bp, Unknown; identical to SEQ ID NO: 558
  Direct repeat nucleotide sequence

SEQ ID NO: 562 - DNA, 36 bp, Unknown; identical to SEQ ID NO: 558
  Direct repeat nucleotide sequence

SEQ ID NO: 563 - DNA, 36 bp, Unknown; identical to SEQ ID NO: 558
  Direct repeat nucleotide sequence

SEQ ID NO: 564 - DNA, 27 bp, Unknown
  Direct repeat nucleotide sequence
gaactacagccctgtgaaataacaggg

SEQ ID NO: 565 - DNA, 36 bp, Unknown; identical to SEQ ID NO: 558
  Direct repeat nucleotide sequence

SEQ ID NO: 566 - DNA, 36 bp, Unknown; identical to SEQ ID NO: 558
  Direct repeat nucleotide sequence

SEQ ID NO: 567 - DNA, 36 bp, Unknown; identical to SEQ ID NO: 558
  Direct repeat nucleotide sequence

SEQ ID NO: 568 - DNA, 36 bp, Unknown; identical to SEQ ID NO: 558
  Direct repeat nucleotide sequence

SEQ ID NO: 569 - DNA, 36 bp, Unknown
  Direct repeat nucleotide sequence
gtttctgaaccctgccatttggcagggtagtagttg

SEQ ID NO: 570 - DNA, 37 bp, Unknown
  Direct repeat nucleotide sequence
tgaacgatagcctgctgaaatatgcaggttctaagac

SEQ ID NO: 571 - DNA, 37 bp, Unknown; identical to SEQ ID NO: 368
  Direct repeat nucleotide sequence

SEQ ID NO: 572 - DNA, 36 bp, Unknown; identical to SEQ ID NO: 439
  Direct repeat nucleotide sequence

SEQ ID NO: 573 - DNA, 20 bp, Unknown
  Direct repeat nucleotide sequence
gacaggaggtgataaaaatg

SEQ ID NO: 574 - DNA, 21 bp, Unknown
  Direct repeat nucleotide sequence
ggaggtgataaaaatgggaaa

SEQ ID NO: 575 - DNA, 21 bp, Unknown
  Direct repeat nucleotide sequence
ttttgcactagtctaaaactt

SEQ ID NO: 576 - DNA, 37 bp, Unknown
  Direct repeat nucleotide sequence
ctactacactagtgcgaatttgcactagtctaaaacc

SEQ ID NO: 577 - DNA, 37 bp, Unknown; identical to SEQ ID NO: 576
  Direct repeat nucleotide sequence

SEQ ID NO: 578 - DNA, 39 bp, Unknown
  Direct repeat nucleotide sequence
ctactacactggtgcgaatttgcactagtctaaaactca

SEQ ID NO: 579 - DNA, 25 bp, Unknown
  Direct repeat nucleotide sequence
gtgcaaatttgcactagtctaaaac

SEQ ID NO: 580 - DNA, 28 bp, Unknown
  Direct repeat nucleotide sequence
ctactacactggtgcgaatttgcactag

SEQ ID NO: 581 - DNA, 39 bp, Unknown; identical to SEQ ID NO: 578
  Direct repeat nucleotide sequence

SEQ ID NO: 582 - DNA, 39 bp, Unknown; identical to SEQ ID NO: 578
  Direct repeat nucleotide sequence

SEQ ID NO: 583 - DNA, 29 bp, Unknown
  Direct repeat nucleotide sequence
actggtgcgaatttgcactggtctaaaac

SEQ ID NO: 584 - DNA, 37 bp, Unknown; identical to SEQ ID NO: 449
  Direct repeat nucleotide sequence

SEQ ID NO: 585 - DNA, 36 bp, Unknown; identical to SEQ ID NO: 385
  Direct repeat nucleotide sequence

SEQ ID NO: 586 - DNA, 36 bp, Unknown; identical to SEQ ID NO: 385
  Direct repeat nucleotide sequence

SEQ ID NO: 587 - DNA, 36 bp, Unknown; identical to SEQ ID NO: 446
  Direct repeat nucleotide sequence

SEQ ID NO: 588 - DNA, 37 bp, Unknown; identical to SEQ ID NO: 384
  Direct repeat nucleotide sequence

SEQ ID NO: 589 - DNA, 36 bp, Unknown; identical to SEQ ID NO: 439
  Direct repeat nucleotide sequence

SEQ ID NO: 590 - protein, 392 aa, Unknown
  human gut metagenome sequence
MSMTPSTFLPKREGGVPYIAEVQSIPLSPSAYSVIIKDKSIFETSLSPNGSVSMSSFLTSIFDSAYIASLKYKSDDNYKYIGIPLLNAFVEWQIKEINDGLDDKSKEIIKSYLISKLSAKYEKTKTENAVRVRLSICRDLYDTLSSDDLYYENKVYSSTLRRFLKAVYEVYALLSDCERERLLFADNIIKINEVIKQNGSRYYSFIYAYSNMYSREKHRIRLIPYRIVSDEYKMYNYLVCLSDEKSAGKEFKADSYRISRLSGLSIAEKLSQKEYSSVTEYERLKEVHVKSVKHLLSDPRFGSDESDISKVYLTEKGVEMFGKILYQRPILKGNEKPKPNAVNEFISPPIQVKYYFNKFGKDGVILSPSDSFEEMRTLYVEGAEAYNREVEM

SEQ ID NO: 591 - protein, 392 aa, Unknown
  human gut metagenome sequence
MSMTPSTFLPKREGGVPYIAEVQSIPLSPSAYSVIIKDKSIFETSLSPNGSVSMSSFLTSIFDSAYIASLKNKSDDNYKYNGIPLLNAFVEWQIEEIDDGLDDKSKEIIKSYLISKLSAKYEKTKTENAVRVRLSICRDLYDTLSSDDLYYENKVYSSTLRRFLKAVYEDYALLSDCERERLIFADNIIKINEVIKQNGSRYYSFIYAYSNMYSREKRRIRLIPYRIVSDEYKMYNYLVCLSDEKSAGKEFKADSYRISRLSGLSIAEKLSQKEYSSVTEYERLKEGHVKSVKHLLSDPRFGSDESDISKVYLTEKGVEMFGKILYQRPILKGNEKPKPNAVNEFISPPIQVKYYFNKFGKDGVILSPSDSFEEMRTLYVEGAEAYNREVEM

SEQ ID NO: 592 - protein, 392 aa, Unknown
  human gut metagenome sequence
MSMTPSTFLPKRDKNVPYIAEVQSIPLSPSAYSVIIKDKSIFETSLSPNGSVSMSSFLTSIFDSAYIASLKYKSDDNYKYIGIPLLNAFVKWQIEEIDDSLDDKSKEIIKSYLISKLSAKYEKTKTENAVRVRLSICRDLYDTLSSDDLYYENKVYSSTLRRFLKAVYEDYALLSDCERERLIFADNIIKINEVIKQNGSRYYSFIYAYSNMYSREKRRIRLIPYRIVSDEYKMYNYLVCLSDEKSAGKEFKADSYRISRLSGLSIAEKLSQKEYSSVTEYERLKEGHVKSVKHLLSDPRFGSDESDISKVYLTEKGVEMFGKILYQRPILKGNEKPKPNAVNEFISPPIQVKYYFNKFGKDGVILSPSDSFEEMRTLYVEGAEAYNREVEM

SEQ ID NO: 593 - protein, 392 aa, Unknown
  human gut metagenome sequence
MSMTPSTFLPKREDGVPYIAEVQSIPLSPSAYSVIIRDKSIFETSLSPNGSVSMSSFLTSIFDSAYIASLKYKSDDNYKYIGIPLLNAFVEWQIKEINDGLDDKSKEIIKSYLISKLSAKYEKTKTENAVRVRLSICRDLYDTLSSDDLYYENKVYSSTLRRFLKAVYEVYALLSDCERERLLFADNIIKINEVIKQNGSRYYSFIYAYSNMYSREKHRIRLIPYRIVSDEYKMYNYLVCLSDEKSAGKEFKADSYRISRLSGLSIAEKLSQKEYSSVTEYERLKEVHVKSVKHLLSDPRFGSDESDISKVYLTEKGVEMFGKILYQRPILKGNEKPKPNAVNEFISPPIQVKYYFNKFGKDGVILSPSDSFEEMRTLYVEGAEAYNREVEM

SEQ ID NO: 594 - protein, 392 aa, Unknown
  human gut metagenome sequence
MSMTPSTFLPKREGSVPYIAEVQSIPLSPSAYSVIIKDKSIFETSLSPNGSVSMSSFLTSIFDSAYIASLKYKSDDNYKYIGIPLLNAFVKWQIEEIDDGLDDKSKEIIKSYLISKLSAKYEKTKTENAVRVRLSICRDLYDTLSSDDLYYENKVYSSTLRRFLKAVYEDYALLSDCERERLLFADNIIKINEVIKQNGSRYYSFIYAYSNMHSREKRRIRLIPYRIVSDEYKMYNYLVCLSDEKGAGKEFKADSCRISRLSGLSIAEKLSQKEYSSVTEYERLKEGHVKSVKHLLSDPRFGSDESDISKVYLTEKGVEMFGKILYQRPILKGNEKPKPNAVNEFISPPIQVKYYFNKFGKDGVILSPSDSFEEMRTLYVEGAEAYNREVEM

SEQ ID NO: 595 - protein, 390 aa, Unknown
  human gut metagenome sequence
MSMTPSTFLPKREDGVPYIAEVQSIPLSPTAYSVIVRDKSIFETSLSPNGGSVSMSSFLTRIFDSAYRASLKYKSEEYNGIPLLNAFVQWQIEEIDGSLDDKSKEIIKSYLISKLSAKYKKTKTENAVRVRLSICRDLYDTLSRDDLCYENKVYGSTLRRFLKAVYEDYALLSDCERERLIFADNIIKINEVIKQNSNRYDNFIYAYSNMYSREKRRIRLIPYRIVSDEYKMYNYLICLSDEKSADKEFKADSYRISRLSGLSIAEKLSQKEYSSVTEYERLKEDHVKSVKHLLNDPRFGSDESDISKVYLTEKGVEMFGKILYQRPILKGNEKPKPNAVNEFISPPIQVKYYFNKFGKDGVILSPSDSFEEMRTLYVEGAEAYNRVVEM

SEQ ID NO: 596 - protein, 392 aa, Unknown
  human gut metagenome sequence
MLIPPSTFLPKRDKNVPYIAEVQSIPLSPSAYSVIIKDKSIFETSLSPNGSVSMSSFLTSIFDSAYIASLKYKSDDNYKYIGIPLLNAFVKWQIEEIDDGLDDKSKEIIKSYLISKLSAKYEKTKTENAVRVRLSICRDLYDTLSSDDLYYENKVYSSTLRRFLKAVYEDYALLSDCERERLIFADNIIKINEVIKQNGSRYYSFIYAYSNMYSREKRRIRLIPYRIVSDEYKMYNYLVCLSDEKSAGKEFKADSCRISRLSGLSIAEKLSQKEYSSVTEYERLKEVHVKSVKHLLSDPRFGSDESDISKVYLTEKGVEMFGKILYQRPILKGNEKPKPNAVNEFISPPIQVKYYFNKFGKDGVILSPSDSFEEMRTLYVEGAEAYNREVEK

SEQ ID NO: 597 - protein, 392 aa, Unknown
  human gut metagenome sequence
MSMTPSTFLPKREGGVPYIAEVQSIPLSPSAYSVIIKDKSIFETSLSPNGSVSMSSFLTSIFDSSYIASLKYKSDDNYKYIGIPLLNAFVKWQIEEIEDGLDDKSKEIIKSYLISKLSAKYEKTKTENAVRVRLSICRDLYDTLSSDDLYYENKVYSSTLRRFLKAVYEDYALLSDCERERLLFADNIIKINEVIKQNGSRYYSFIYAYSNMYSREKRRIRLIPYRIVSDEYKMYNYLVCLSDEKSAGKEFKADSYRISRLSGLSIAEKLSQKEYFSVTEYERLKEGHVKSVKHLLSDPRFGSDESDISKVYLTEKGVEMFGKILYQRPILKGNEKPKPNAVNEFISPPIQVKYYFNKFGKDGVILSPSDSFEEMRTLYVEGAEAYNREVEM

SEQ ID NO: 598 - protein, 392 aa, Unknown
  human gut metagenome sequence
MSMTPSTFLPKREGGVPYIAEVQSIPLSPSAYSVIIKDKSIFETSLSPNGSVSMSSFLTSIFDSAYIASLKYKSGDNYKYIGIPLLNAFVKWQIEEIDDGLDDKSKKIIKSYLISKLSAKYEKTKTENAVRVRLSICRDLYDTLSSDDLYYENKVYSLTLRRFLKAVYEDYALLSDCERERLIFADNIIKINEVIKQNGSRYYSFIYAYSNMYSREKRRIRLIPYRIVSDEYKMYNYLVCLSDEKSAGKEFKADSYRISRLSGLSIAEKLSQKEYSSVTEYERLKEGHVKSVKHLLSDPRFGSDESDISKVYLTEKGVEMFGKILYQRPILKGNEKPKPNAVNEFISPPIQVKYYFNKFGKDGVILSPSDSFEEMRTLYVEGAEAYNREVEM

SEQ ID NO: 599 - protein, 389 aa, Unknown
  human gut metagenome sequence
MSMTPSTFLPKREDGVPYIAEVQSIPLSPSAYSVIIKDKSIFETSLSPNGSVSMSSFLTSIFDSAYIASLKYKSEKYNGIPLLNAFVKWQIEEIDDSLDDKSKEIIKSYLISKLSAKYEKTKTENAVRVRLSICRDLYDTLSSDDLYYENKVYSSTLRRFLKAVYEDYALLSDCERERLIFADNIIKINEVIKQNGSRYYSFIYAYSNMYSREKRRIRLIPYRIVSDEYKMYNYLVCLSDEKSAGKEFKADSYRISRLSGLSIAEKLSQKEYSSVTEYERLKEGHVKSVKHLLSDPRFGSDESDISKVYLTEKGVEMFGKILYQRPILKGNEKPKPNAVNEFISPPIQVKYYFNKFGKDGVILSPSDSFEEMRTLYVEGAEAYNREVEM

SEQ ID NO: 600 - protein, 392 aa, Unknown
  human gut metagenome sequence
MLIPPSTFLPKREDGVPYIAEVQSIPLSPSAYSVIIKDKSIFETSLSPNGSVSMSSFLTSIFDSAYIASLKYKSDDNYKYIGIPLLNAFVEWQIEEIDDGLDDKSKEIIKSYLISKLSAKYEKTKTENAVRVRLSICRDLYDTLSSDDLYYENKVYSSTLRRFLKAVYEDYALLSDCERERLLFADNIIKINEVIKQNGSRYYSFIYAYSNMYSREKRRIRLIPYRIVSDEYKMYNYLVCLSDEKSAGKEFKADSYRISRLSGLSIAEKLSQKEYSSVTEYERLKEVHVKSVKHLLSDPRFGSDESDISKVYLTEKGVEMFGKILYQRPILKGNEKPKPNAVNEFISPPIQVKYYFNKFGKDGVILSPSDSFEEMRTLYVEGAEAYNREVEI

SEQ ID NO: 601 - protein, 390 aa, Unknown
  human gut metagenome sequence
MSMTPSTFLPKRDTNIPYIAEVQSIPLSPSAYAVIVKDKSIFETSLFPNGGSVSMSSFLTRIFDSAYIASLKYKSEEYNGIPLLNAFVQWQIEEIDDSLDDKSKEIIKSYLISKLSAKYEKTKTENAVRVRLSICRDLYDTLSSDDLYYENKVYSSTLRRFLKAVYEDYALLSDCERERLIFADNIIKINEVIKQNGSRYYSFIYAYSNMYSREKRRIRLIPYRIVSDEYKMYNYLVCLSDEKSAGKEFKADSYRISRLSGLSIAEKLSQKEYSSVTEYERLKEVHVKSVKHLLSDPRFGSDESDISKVYLTEKGVEMFGKILYQRPILKGNEKPKPNTVNEFISPPIQVKYYFNKFGKDGVILSPSDSFEEMRTLYVEGAEAYNREVEK

SEQ ID NO: 602 - protein, 392 aa, Unknown
  human gut metagenome sequence
MSMTPSTFLPKREGGVPYIAEVQSIPLSPSAYSVIIKDKSIFETSLSPNGSVSMSSFLTSIFDSAYIASLKYKSDDNYKYIGIPLLNAFVEWQIKEINDGLDDKSKEIIKSYLISKLSAKYEKTKTENAVRVRLSICRDLYDTLSSDDLYYENKVYSSTLRRFLKAVYEDYALLSDCERERLIFADNIIKINEVIKQNGSRYYSFIYAYSNMYSREKRRIRLIPYRIVSDEYKMYNYLVCLSDEKSAGKEFKADSYRISRLSGLSIAEKLSQKEYSSVTEYERLKEGHVKSVKHLLSDPRFGSDESDISKVYLTEKGVEMFGKILYQRPILKGNEKPKPNAVNEFISPPIQVKYYFNKFGKDGVILSPSDSFEEMRTLYVEGAEAYNREVEI

SEQ ID NO: 603 - protein, 392 aa, Unknown
  human gut metagenome sequence
MLIPPSTFLPKREDGVPYIAEVQSIPLSPSAYSVIIKDKSIFETSLSPNGSVSMSSFLTSIFDSAYIASLKYKSDDNYKYNGIPLLNAFVEWQIEEIDDGLDDKSKEIIKSYLISKLSAKYEKTKTENAVRVRLSICRDLYDTLSSDDLYYENKVYSSTLRRFLKAVYEDYALLSDCERERLIFADNIIKINEVIKQNGSRYYSFIYAYSNMYSREKRRIRLIPYRIVSDEYKMYNYLVCLSDEKSAGKEFKADSYRISRLSGLSIAEKLSQKEYSSVTEYERLKEGHVKSVKHLLSDPRFGSDESDISKVYLTEKGVEMFGKILYQRPILKGNEKPKPNAVNEFISPPIQVKYYFNKFGKDGVILSPSDSFEEMRTLYVEGAEAYNREVEI

SEQ ID NO: 604 - protein, 390 aa, Unknown
  human gut metagenome sequence
MSMTPSTFLPKREDGVPYIAEVQSIPLSPTAYSVIVRDKSIFETSLSPNGGSVSMSSFLTRIFDSAYRASLKYKSEEYNGIPLLNAFVQWQIEEIDGSLDDKSKEIIKSYLISKLSAKYKKTKTENAVRVRLSICRDLYDTLSRDDLCYENKVYGSTLRRFLKAVYEDYALLSDCERERLIFADNIIKINEVIKQNSNRYDNFIYAYSNMYSREKRRIRLIPYRIVSDEYKMYNYLICLSDEKSADKEFKADSYRISRLSGLSIAEKLSQKEYSSVTEYERLKEDHVKSVKHLLNDPRFGSDESDISKVYLTEKGVEMFGKILYQRPILKGNEKPKPNAVNEFISPPIQVKYYFNKFGKDGVILSPSDSFEEMRTLYVEGAEAYNRVVEI

SEQ ID NO: 605 - protein, 392 aa, Unknown
  human gut metagenome sequence
MSMTPSTFLPKREDGVPYIAEVQSIPLSPSAYSVIIRDKSIFETSLSPNGSVSMSSFLTSIFDSAYIASLKYKSDDNYKYIGIPLLNAFVEWQIKEINDGLDDKSKEIIKSYLISKLSAKYEKTKTENAVRVRLSICRDLYDTLSSDDLYYENKVYSSTLRRFLKAVYEVYALLSDCERERLLFADNIIKINEVIKQNGSRYYSFIYAYSNMYSREKHRIRLIPYRIVSDEYKMYNYLVCLSDEKSAGKEFKADSYRISRLSGLSIAEKLSQKEYSSVTEYERLKEVHVKSVKHLLSDPRFGSDESDISKVYLTEKGVEMFGKILYQRPILKGNEKPKPNAVNEFISPPIQVKYYFNKFGKDGVILSPSDSFEEMRTLYVEGAEAYNREVEI

SEQ ID NO: 606 - protein, 392 aa, Unknown
  human gut metagenome sequence
MSMTPSTFLPKRDKNATYIAEVQSIPLSPSTYSVIIKDKSIFETSLSPNGSVSMSSFLTSIFDSAYIASLKYKSDDNYKYIGIPLLNAFVEWQIEEIDDGLDDKSKEIIKSYLISKLSAKYKKTKTENAVRVRLSICRGLYDTLSSDDLYYENKVYSSTLRRFLKAVYEDYALLSDCERERLIFADNIIKINEVIKQNGSRYYSFIYAYSNMYSREKRRIRLIPYRIVSDEYKMYNYLVCLSDEKSAGKEFKADSYRISRLSGLSIAEKLSQKEYSSVTEYERLKEVHVKSVKHLLSDPRFGSDESDISKVYLTEKGVEMFGKILYQRPILKGNEKPKPNAVNEFISPPIQVKYYFNKFGKDGVILSPSDSFKEMRTLYVEGAEAYNREVEM

SEQ ID NO: 607 - protein, 392 aa, Unknown
  human gut metagenome sequence
MLIPPSTFLPKREGGVPYIAEVQSIPLSPSAYSVIIKDKSIFETSLSPNGSVSMSSFLTSIFDSAYIASLKYKSDDNYKYIGIPLLNAFVEWQIEEIDDGLDDKSKEIIKSYLISKLSAKYEKTKTENAVRVRLSICRDLYDTLSSDDLYYENKVYSSTLRKFLKAVYEDYALLSDCERERLLFADNIIKINEVIKQNGSRYYSFIYAYSNMYSREKRRIRLIPYRIVSDEYKMYNYLVCLSDEKSAGKEFKADSYRISRLSGLSIAEKLSQKEYSSVTEYERLKDGHVKSVKHLLSDPRFGSDESDISKVYLTEKGVEMFGKILYQRPILKGNEKPKPNAVNEFISPPIQVKYYFNKFGKDGVILSPSDSFEEMRTLYVEGAEAYNREVEM

SEQ ID NO: 608 - protein, 392 aa, Unknown
  human gut metagenome sequence
MSMTPSTFLPKREGGVPYIAEVQSIPLSPSAYSVIIKDKSIFETSLSPNGSVSMSSFLTSIFDSAYIASLKYKSGDNYKYIGIPLLNAFVKWQIEEIDDGLDDKSKKIIKSYLISKLSAKYEKTKTENAVRVRLSICRDLYDTLSSDDLYYENKVYSLTLRRFLKAVYEDYALLSDCERERLIFADNIIKINEVIKQNGSRYYSFIYAYSNMYSREKRRIRLIPYRIVSDEYKMYNYLVCLSDEKSAGKEFKADSYRISRLSGLSIAEKLSQKEYSSVTEYERLKEGHVKSVKHLLSDPRFGSDESDISKVYLTEKGVEMFGKILYQRPILKGNEKPKPNAVNEFISPPIQVKYYFNKFGKDGVILSPSDSFEEMRTLYVEGAEAYNREVEK

SEQ ID NO: 609 - protein, 392 aa, Unknown
  human gut metagenome sequence
MLIPPSTFLPKRDKNVPYIAEVQSIPLSPSAYSVIIKDKSIFETSLSPNGSVSMSSFLTSIFDSAYIASLKYKSDDNYKYIGIPLLNAFVEWQIEEIDDSLDDKSKEIIKSYLISKLSAKYEKTKTENAVRVRLSICRDLYDTLSSDDLYYENKVYSLTLRRFLKAVYEDYALLSDCERERLIFADNIIKINEVIKQNGSRYYSFIYAYSNMYSREKRRIRLIPYRIVSDEYKMYNYLVCLSDEKSAGKEFKADSYRISRLSGLSIAEKLSQKEYSSVTEYERLKEGHVKSVKHLLSDPRFGSDESDISKVYLTEKGVEMFGKILYQRPILKGNEKPKPNTVNEFISPPIQVKYYFNKFGKDGVILSPSDSFEEMRTLYVEGAEAYNREVEI

SEQ ID NO: 610 - protein, 392 aa, Unknown
  human gut metagenome sequence
MLIPPSTFLPKRDKNVPYIAEVQSIPLSPSAYSVIIKDKSIFETSLSPNGSVSMSSFLTSIFDSAYIASLKYKSDDNYKYIGIPLLNAFVKWQIEEIDDGLDDKSKEIIKSYLISKLSAKYEKTKTENAVRVRLSICRDLYDTLSSDDLYYENKVYSSTLRRFLKAVYEDYALLSDCERERLIFADNIIKINEVIKQNGSRYYSFIYAYSNMYSREKRRIRLIPYRIVSDEYKMYNYLVCLSDEKSASKEFKADSCRISRLSGLSIAEKLSQKEYSSVTEYERLKEVHVKSVKHLLSDPRFGSDESDISKVYLTEKGVEMFGKILYQRPILKGNEKPKPNAVNEFISPPIQVKYYFNKFGKDGVILSPSDSFEEMRTLYVEGAEAYNREVEM

SEQ ID NO: 611 - protein, 389 aa, Unknown
  human gut metagenome sequence
MSMTPSTFLPKREGGVPYIAEVQSIPLSPSAYSVIIKDKSIFETSLSPNGSVSMSSFLTRIFDSAYIASLKYKSEEYNGIPLLNAFVQWQIEEIDDSLDDKSKEIIKSYLISKLSAKYEKTKTENAVRVRLSICRDLYDTLSSDDLYYENKVYSSTLRRFLKAVYEDYALLSDCERERLIFADNIIKINEVIKQNGSRYYSFIYAYSNMYSREKRRIRLIPYRIVSDEYKMYNYLVCLSDEKSAGKEFKADSYRISRLSGLSIAEKLSQKEYSSVTEYERLKEVHVKSVKHLLSDPRFGSDESDISKVYLTEKGVEMFGKILYQRPILKGNEKPKPNTVNEFISPPIQVKYYFNKFGKDGVILSPSDSFEEMRTLYVEGAEAYNREVEK

SEQ ID NO: 612 - protein, 392 aa, Unknown
  human gut metagenome sequence
MSMTPSTFLPKREGGVPYIAEVQSIPLSPSAYSVIIKDKSIFETSLSPNGSVSMSSFLTSIFDSAYIASLKYKSDDNYKYIGIPLLNAFVEWQIEEIDDSLDDKSKEIIKSYLISKLSAKYEKTKTENAVRVRLSICRDLYDTLSSDDLYYENKVYSSTLRRFLKAVYEDYALLSDCERERLLFADNIIKINEVIKQNGSRYYSFIYAYSNMYSREKHRIRLIPYRIVSDEYKMYNYLVCLSDEKSAGKEFKADSYRISRLSGLSIAEKLSQKEYSSVTEYERLKEGHVKSVKHLLSDPRFGSDESDISKVYLTEKGVEMFGKILYQRPILKGNEKPKPNAVNEFISPPIQVKYYFNKFGKDGVILSPSDSFEEMRTLYVEGAEAYNRVVEM

SEQ ID NO: 613 - protein, 392 aa, Unknown
  human gut metagenome sequence
MSMTPSTFLPKREDGVPYIAEVQSIPLSPSAYSVIIKDKSIFETSLSPNGSVSMSSFLTSIFDSAYIASLKYKSNDNYKYIGIPLLNAFVQWQIEEIDDSLDDKSKEIIKSYLISKLSAKYEKTKTENAVRVRLSICRDLYDTLSSDDLYYENKVYSSTLRRFLKAVYEDYALLSDCERERLIFADNIIKINEVIKQNGSRYYSFIYAYSNMYSREKRRIRLIPYRIVSDEYKMYNYLVCLSDEKSAGKEFKADSCRISRLSGLSIAEKLSQKEYSSVTEYERLKESHVKSVKHLLSDPRFGSDESDISKVYLTEKGVEMFGKILYQRPILKGNEKPKPNAVNEFISPPIQVKYYFNKFGKDGVIISPSDSFEEMRTLYVEGAEAYNREVEM

SEQ ID NO: 614 - protein, 392 aa, Unknown
  human gut metagenome sequence
MLIPPSTFLPKREDGVPYIAEVQSIPLSPSAYSVIIRDKSIFETSLSPNGSVSMSSFLTSIFDSAYIASLKYKSDDNYKYIGIPLLNAFVEWQIKEINDGLDDKSKEIIKSYLISKLSAKYEKTKTENAVRVRLSICRDLYDTLSSDDLYYENKVYSSTLRRFLKAVYEVYALLSDCERERLLFADNIIKINEVIKQNGSRYYSFIYAYSNMYSREKHRIRLIPYRIVSDEYKMYNYLVCLSDEKSAGKEFKADSYRISRLSGLSIAEKLSQKEYSSVTEYERLKEVHVKSVKHLLSDPRFGSDESDISKVYLTEKGVEMFGKILYQRPILKGNEKPKPNAVNEFISPPIQVKYYFNKFGKDGVILSPSDSFEEMRTLYVEGAEAYNREVEM

SEQ ID NO: 615 - protein, 392 aa, Unknown
  human gut metagenome sequence
MSMTPSTFLPKREKNATYIAEVQSIPLSPAAYSVIIKDKSIFETSLSPNGSVSMSSFLTSIFDSAYIASLKYKTDDNYKYIGIPLLNAFIKWQIEEIDDGLDDKSKEIIKSYLISKFSAKYEKTKTENAVRVRLSICRDLYDTLSSDDLYYENKVYSSTLRRFLKAVYEDYALLSDCERERLIFADNIIKINEVIKQNGNRYYSFIYAYSNMYSREKRRIRLIPYRIISDEYKMYNYLVCLSDEKSAGKEFKADSCRISRLSGLSIAEKLSQKEYSSVTEYERLKEGHVKSVKHLLSDPRFGSDESDISKVYLTEKGVEMFGKILYQRPILKGNEKPKPNAVNEFISPPIQVKYYFNKFGKDGVILSPSDSFEEMRTLYVEGAEAYNREVEK

SEQ ID NO: 616 - protein, 390 aa, Unknown
  human gut metagenome sequence
MSMTPSTFLPKRDTNIPYIAEVQSIPLSPSAYAVIVKDKSIFETSLFPNGGSVSMSSFLTRIFDSAYIASLKYKSEEYNGIPLLNAFVQWQIEEIDDSLDDKSKEIIKSYLISKLSAKYEKTKTENAVRVRLSICRDLYDTLSSDDLYYENKVYSSTLRRFLKAVYEDYALLSDCERERLIFADNIIKINEVIKQNGSRYYSFIYAYSNMYSREKRRIRLIPYRIVSDEYKMYNYLVCLSDEKSAGKEFKADSCRISRLSGLSIAEKLSQKEYSCVTEYERLKEVHVKSVKHLLSDPRFGSDESDISKVYLTEKGVEMFGKILYQRPILKGNEKPKPNAVNEFISPPIQVKYYFNKFGKDGVIISPSDSFEEMRTLYVEGAEAYNREVEM

SEQ ID NO: 617 - protein, 389 aa, Unknown
  human gut metagenome sequence
MLIPPSTFLPKREGGVPYIAEVQSIPLSPSAYSVIIKDKSIFETSLSPNGSVSMSSFLTSIFDSAYIASLKYKSEKYNGIPLLNAFVKWQIEEIDDGLDDKSKEIIKSYLISKLSAKYKKTKTENAVRVRLSISRDLYDTLSSDDLYYENKVYSSTLRRFLKAVYEDYALLSDCERERLIFADNIIKINEVIKQNGSRYYSFIYAYSNMYSREKHRIRLIPYRIVSDEYKMYNYLVCLSDEKSAGKEFKADSCRISRLSGLSIAEKLSQKEYSSVTEYERLKEGHVKSVKHLLSDPRFGSDESDISKVYLTEKGVEMFGKILYQRPILKGNEKPKPNAVNEFISPPIQVKYYFNKFGKDGVILSPSDSFEEMRTLYVEGAEAYNREVEM

SEQ ID NO: 618 - protein, 392 aa, Unknown
  human gut metagenome sequence
MLIPTSTFLPKREGGVPYIAEVQSIPLSPSAYSVIIKDKSIFETSLSPNGSVSMSSFLTSIFDSAYIASLKYKSDDNYKYIGIPLLNAFVKWQIEEIDDGLDDKNKEIIKSYLISKLSAKYEKTKTENAVRVRLSICRDLYDTLSSDDLYYENKVYSSTLRRFLKAVYEDYALLSDCERERLLFADNIIKINEVIKQNGSRYYSFIYAYSNMYSREKRLIRLIPYRIVSDEYKMYNYLVCLSDEKSAGKEFKADSYRISRLSGLSIAEKLSQKEYSSVTEYERLKEGHVKSVKHLLSDPRFGSDESDISKVYLTEKGVEMFGKILYQRPILKGNEKPKPNAVNEFISPPIQVKYYFNKFGKDGVILSPSDSFEEMRTLYVEGAEAYNREVEK

SEQ ID NO: 619 - protein, 392 aa, Unknown
  human gut metagenome sequence
MSMTPSTFLPKREGGVPYIAEVQSIPLSPSAYSVIIKDKSIFETSLSPNGSVSMSSFLTSIFDSAYIASLKYKSDDNYKYIGIPLLNAFVEWQIEEIDDGLDDKSKEIIKSYLISKLSAKYEKTKTENAVRVRLSICRDLYDTLSSDDLYYENKVYSLTLRRFLKAVYEDYALLSDCERERLIFADNIIKINEIIKQNGSRYYSFIYAYSNMYSREKRRIRLIPYRIVSDEYKMYNYLVCLSDEKSAGKEFKADSYRISRLSGLSIAEKLSQKEYSSVTEYERLKEVHVKSVKHLLSDPRFGSDESDISKVYLTEKGVEMFGKILYQRPILKGNEKPKPNAVNEFISPPIQVKYYFNKFGKDGVILSPSDSFEEMRTLYVEGAEAYNREVKM

SEQ ID NO: 620 - protein, 392 aa, Unknown
  human gut metagenome sequence
MLIPPSTFLPKRDKNATYIAEVQSIPLSPSAYSVIIKDKSIFETSLSPNGSVSMSSFLTSIFDSAYIASLKYKSDDNYKYIGIPLLNAFVKWQIEEIDDSLDDKSKEIIKSYLISKLSAKYEKTKTENAVRVRLSICRDLYDTLSSDDLYYENKVYSLTLRRFLKAVYEDYALLSDCERERLIFADNIIKINEVIKQNGSRYYSFIYAYSNMYSREKRRIRLIPYRIVSDEYKMYNYLVCLSDEKSAGKEFKADSYRISRLSGLSIAEKLSQKEYSSVTEYERLKEGHVKSVKHLLSDPRFGSDESDISKVYLTEKGVEMFGKILYQRPILKGNEKPKPNAVNEFISPPIQVKYYFNKFGKDGVILSPSDSFEEMRTLYVEGAEAYNREVEM

SEQ ID NO: 621 - protein, 389 aa, Unknown
  human gut metagenome sequence
MSMTPSTFLPKREDGVPYIAEVQSIPLSPSAYSVIIKDKSIFETSLSPNGSVSMSSFLTSIFDSAYIASLKYKSEKYNGIPLLNAFVKWQIEEIDDSLDDKSKEIIKSYLISKLSAKYEKTKTENAVRVRLSICRDLYDTLSSDDLYYENKVYSSTLRRFLKAVYEDYALLSDCERERLIFADNIIKINEVIKQNGSRYYSFIYAYSNMYSREKRRIRLIPYRIVSDEYKMYNYLVCLSDEKSAGKEFKADSYRISRLSGLSIAEKLSQKEYSSVTEYERLKEGHVKSVKHLLSDPRFGSDESDISKVYLTEKGVEMFGKILYQRPILKGNEKPKSNAVNEFISPPIQVKYYFNKFGKDGVIISPSDSFEEMRTLYVEGAEAYNRVVEM

SEQ ID NO: 622 - protein, 392 aa, Unknown
  human gut metagenome sequence
MSMTPSTFLPKREGGVPYIAEVQSIPLSPSAYSVIIKDKSIFETSLSPNGSVSMSSFLTSIFDSAYIASLKYKSDDNYKYIGIPLLNAFVEWQIEEIDDSLDDKSKEIIKSYLISKLSAKHEKTKTENAVRVRLSICRDLYDTLSSDDLYYENKVYSSTLRRFLKAVYEDYALLSDCERERLLFADNIIKINEVIKQNGSRYYSFIYAYSNMYSREKRLIRLIPYRIVSDEYKMYNYLVCLSDEKSAGKEFKADSYRISRLSGLSIAEKLSQKEYSSVTEYERLKEGHVKSVKHLLSDPRFGSDESDISKVYLTEKGVEMFGKILYQRPILKGNEKPKPNAVNEFISPPIQVKYYFNKFGKDGVILSPSDSFEEMRTLYVEGAEAYNREVEK

SEQ ID NO: 623 - protein, 392 aa, Unknown
  human gut metagenome sequence
MLIPPSTFLPKREGGVPYIAEVQSIPLSPSAYSVIIKDKSIFETSLSPNGSVSMSSFLTSIFDSAYIASLKYKSDDNYKYIGIPLLNAFVKWQIEEIDDGLDDKSKEIIKSYLISKLSAKYKKTKTENAVRVRLSICRGLYDTLSSDDLYYENKVYSSTLRRFLKAVYEDYALLSDCERERLIFADNIIKINEVIKQNGSRYYSFIYAYSNMYSREKRRIRLIPYRIVSDEYKMYNYLVCLSDEKSAGKEFKADSYRISRLSGLSIAEKLSQKEYSSVTEYERLKEGHVKSVKHLLNDPRFGSDESDISKVYLTEKGVEMFGKILYQRPILKGNEKPKPNAVNEFISPPIQVKYYFNKFGKDGVILSPSDSFEEMRTLYVEGAEAYNREVEM

SEQ ID NO: 624 - protein, 392 aa, Unknown
  human gut metagenome sequence
MSMTPSTFLPKREDGVPYIAEVQSIPLSPSAYSVIIKDKSIFETSLSPNGSVSMSSFLTSIFDSAYIASLKYKSNDNYKYIGIPLLNAFVEWQIEEIDDGLDDKSKEIIKSYLISKLSAKYEKTKTENAVRVRLSICRDLYDTLSSDDLYYENKVYSSTLRRFLKAVYEDYALLSDCERERLIFADNIIKINEVIKQNGSRYYSFIYAYSNMYSREKRRIRLIPYRIVSDEYKMYNYLVCLSDEKSAGKEFKADSYRISRLSGLSIAEKLSQKEYSSVTEYERLKEGHVKSVKHLLSDPRFGSDESDISKVYLTEKGVEMFGKILYQRPILKGNEKPKPNAVNEFISPPIQVKYYFNKFGKDGVILSPSDSFEEMRTLYVEGAEAYNREVEK

SEQ ID NO: 625 - protein, 392 aa, Unknown
  human gut metagenome sequence
MLIPPSTFLPKREGGVPYIAEVQSIPLSPSAYSVIIKDKSIFETSLFPNGSVSMSSFLTSIFDSAYIASLKYKSDDNYKYIGIPLLNAFVEWQIEEIDDGLDDKSKEIIKSYLISKLSAKYKKTKTENAVRVRLSICRDLYDTLSSDDLYYENKVYSSTLRRFLKAVYEDYTLLSDCERERLIFADNIIKINEVIKQNGSRYYSFIYAYSNMYSREKRRIRLIPYRIVSDEYKMYNYLVCLSDEKSAGKEFKADSYRISRLSGLSIAEKLSQKEYSSVTEYERLKEGHVKSVKHLLSDPRFGSDESDISKVYLTEKGVEMFGKILYQRPILKGNEKPKPNAVNEFISPPIQVKYYFNKFGKDGVILSPSDSFEEMRTLYVEGAEAYSREVEM

SEQ ID NO: 626 - protein, 389 aa, Unknown
  human gut metagenome sequence
MSMTPSTFLPKREDGVPYIAEVQSIPLSPSAYSVIIKDKSIFETSLSPNGSVSMSSFLTSIFDSAYIASLKYKSEKYNGIPLLNAFVKWQIEEIDDSLDDKSKEIIKSYLISKLSAKYEKTKTENAVRVRLSICRDLYDTLSSDDLYYENKVYSSTLRRFLKAVYEDYALLSDCERERLIFADNIIKINEVIKQNGSRYYSFIYAYSNMYSREKRRIRLIPYRIVSDEYKMYNYLVCLSDEKSAGKEFKADSYRISRLSGLSIAEKLSQKEYSSVTEYERLKEVHVKSVKHLLSDPRFGSDESDISKVYLTEKGVEMFGKILYQRPILKGNEKPKPNTVNEFISPPIQVKYYFNKFGKDGVILSPSDSFEEMRTLYVEGAEAYNREVEK

SEQ ID NO: 627 - protein, 392 aa, Unknown
  human gut metagenome sequence
MSMTPSTFLPKREDGVPYIAEVQSIPLSPSAYSVIIKDKSIFETSLSPNGSVSMSSFLTSIFDSAYIASLKYKSDDNYKYIGIPLLNAFVEWQIEEIDDSLDDKSKEIIKSYLISKLSAKHEKTKTENAVRVRLSICRDLYDTLSSDDLYYENKVYSSTLRRFLKAVYEDYALLSDCERERLLFADNIIKINEVIKQNGSRYYSFIYAYSNMYSREKRRIRLIPYRIVSDEYKMYNYLVCLSDEKSAGKEFKADSYRISRLSGLSIAEKLSQKEYSSVTEYERLKEGHVKSVKHLLSDPRFGSDESDISKVYLTEKGVEMFGKILYQRPILKGNEKPKPNAVNEFISPPIQVKYYFNKFGKDGVILSPSDSFEEMRTLYVEGAEAYNREVEM

SEQ ID NO: 628 - protein, 392 aa, Unknown
  human gut metagenome sequence
MSMTPSTFLPKREGGVPYIAEVQSIPLSPSAYSVIIKDKSIFETSLSPNSSVSMSSFLTSIFDSAYIASLKYKSDDNYKYIGIPLLNAFVKWQIEEIDDDIDDKSKEIIKSYLISKLSAKYKKTKTENAVRVRLSICRDLYDTLSSDDLYYENKVYSSTLRRFLKAVYEDYALLSDCERERLLFADNIIKINEVIKQNGSRYYSFIYAYSNMYSREKRRIRLIPYRIVSDEYKMYNYLVCLSDEKSAGKEFKADSYRISRLSGLSIAEKLSQKEYSSVTEYERLKEGHVKSVKHLLSDPRFGSDESDISKVYLTEKGVEMFGKILYQRPILKGNEKPKPNAVNEFISPPIQVKYYFNKFGKDGVILSPSDSFEEMRTLYVEGAEAYNREVEM

SEQ ID NO: 629 - protein, 355 aa, Unknown
  human gut metagenome sequence
MLIPPSTFLPKRDKNATYIAEVQSIPLSPSAYSVIIKDKSIFETSLSPNGSVSMSSFLTSIFDSAYIASLKYKSDDNYKYIGIPLLNAFVKWQIEEIDDSLDDKSKEIIKSYLISKLSAKYEKTKTENAVRVRLSICRDLYDTLSSDDLYYENKVYSLTLRRFLKAVYEDYALLSDCERERLIFADNIIKINEVIKQNGSRYYSFIYAYSNMYSREKRRIRLIPYRIVSDEYKMYNYLVCLSDEKSAGKEFKADSYRISRLSGLSIAEKLSQKEYSSVTEYERLKEGHVKSVKHLLSDPRFGSDESDISKVYLTEKGVEMFGKILYQRPILKGKAQAQRCQRVHLPAYPSQILFQ

SEQ ID NO: 630 - protein, 392 aa, Unknown
  human gut metagenome sequence
MSMTPSTFLPKREDGVPYIAEVQSIPLSPSAYSVIIRDKSIFETSLSPNGNVSMSSFLTSIFDSAYIASLKYKSDDNYKYIGIPLLNAFVKWQIEEIDDDLDDKSKEIIKSYLISKLSAKYEKTKTENAVRVRLSICRDLYDTLSSDDLYYENKVYSSTLRRFLKAVYEDYALLSDCERERLIFADNIIKINEVIKQNGSRYYSFIYAYSNMYSREKRRIRLIPYRIVSDEYKMYNYLVCLSDEKSAGKEFKADSYRISRLSGLSIAEKLSQKEYSSVTEYERLKEVHVKSVKHLLSDPRFGSDESDISKVYLTEKGVEMFGKILYQRPILKGNEKPKPNAVNEFISPPIQVKYYFNKFGKDGVILSPSDSFEEMRTLYVEGAEAYNRVVEM

SEQ ID NO: 631 - protein, 392 aa, Unknown
  human gut metagenome sequence
MLMTPSTFLPKREGGVPYIAEVQSIPLSPSAYSVIIKDKSIFETSLSPNGSVSMSSFLTSIFDSAYIASLKYKSDDNYKYIGIPLLNAFVKWQIEEIDDGLDDKSKKIIKSYLISKLSAKYKKTKTENAVRVRLSICRDLYDTLSSDDLYYENKVYSSTLRRFLKAVYEDYALLSDCERERLLFADNIIKINEVIKQNGSRYYSFIYAYSNMYSREKRRIRLIPYRIVSDEYKMYNYLVCLSDEKSEGKEFKADSYRISRLSGLSISEKLSQKEYSSVTEYERLKEGHVKSVKHLLSDPRFGSDESDISKVYLTEKGVEMFGKILYQRPILKGNEKPKPNAVNEFISPPIQVKYYFNKFGKDGVILSPSDSFEEMRTLYVEGAEAYNREVEK

SEQ ID NO: 632 - protein, 392 aa, Unknown
  human gut metagenome sequence
MLIPPSTFLPKREGGVPYIAEVQSIPLSPSAYSVIIKDKSIFETSLSPNGSVSMSSFLTSIFDSTYIASLKYKSDDNYKYIGIPLLNAFVEWQIEEIDDGLDDKSKEIIKSYLISKLSAKYEKTKTENAVRVRLSICRDLYDTLSSDDLYYENKVYSSTLRRFLKAVYEDYALLSDCERERLLFADNIIKINEVIKQNGSRYYSFIYAYSNMYSREKHRIRLIPYRIVSDEYKMYNYLVCLSDEKSAGKEFKADSYRISRLSGLSIAEKLSQKEYSSVTEYERLKEGHVKSVKHLLSDPRFGSDESDISKVYLTEKGVEMFGKILYQRPILKGNEKPKPNAVNEFISPPIQVKYYFNKFGKDGVILSPSDSFEEMRTLYVEGAEAYNREVEM

SEQ ID NO: 633 - protein, 390 aa, Unknown
  human gut metagenome sequence
MSMTPSTFLPKREDGVPYIAEVQSIPLSPSAYSVIIKDKSIFETSLSPNGSVSMSSFLTSIFDSAYIASLKYKSDDNYKYIGIPLLNAFVKWQIEEIDDSLDDKSKEIIKSYLISKLSAKYEKTKTENAVRVRLSICRDLYDTLSSDDLYYENKVYSSTLRRFLKAVYEDYALLSDCERERLIFADNIIKINEVIKQNGSRYYSFIYAYSNMYSREKRRIRLIPYRIVSDEYKMYNYLVCLSDEKSAGKEFKADSYRISRLSGLSIAEKLSQKEYSSVTEYERLKEGHVKSVKHLLSDPRFGSDESDISKVYLTEKGVEMFGKILYQRPILKGNEKPNAVNEFISPPIQVKYYFNKFGKDGVILSPSDSFEEMRTLYVEGAEAYNREVEM

SEQ ID NO: 634 - protein, 392 aa, Unknown
  human gut metagenome sequence
MSMTPSTFLPKREGGVPYIAEVQSIPLSPSAYSVIIKDKSIFETSLSPNGSVSMSSFLTSIFDSAYIASLKYKSDDNYKYIGIPLLNAFVQWQIEEIDDGLDDKSKEIIKSYLISKLSAKYEKTKTENAVRVRLSICRDLYDTLSSDDLYYENKVYSSTLRRFLKAVYEDYALLSDCERERLLFADNIIKINEVIKQNGSRYYSFIYAYSNMYSREKRLIRLIPYRIVSDEYKMYNYLVCLSDEKSAGKEFKADSCRISRLSGLSIAEKLSQKEYSSVTEYERLKEGHVKSVKHLLSDPRFGSDESDISKVYLTEKGVEMFGKILYQRPILKGNEKPKPNAVNEFISPPIQVKYYFNKFGKDGIILSPSDSFEEMRTLYVEGAEAYNREVEM

SEQ ID NO: 635 - protein, 392 aa, Unknown
  human gut metagenome sequence
MLIPPSTFLPKREGGVPYIAEVQSIPLSPSAYSVIIKDKSIFETSLSPNGSVSMSSFLTSIFDSAYIASLKYKSDDNYKYIGIPLLNAFVEWQIEEIDDGLDDKSKEIIKSYLISKLSAKYEKTKTENAVRVRLSICRDLYDTLSSDDLYYENKVYSSTLRRFLKAVYEDYALLSDCKRERLLFAENIIKINEVIKQNGSRYYSFIYAYSNMYSREKRRISLIPYRIVSDEYKMYNYLVCLSDEKSAGKEFKADSYRISRLSGLSIAEKLSQKEYSSVTEYERLKEGRVKSVKHLLSDPRFGSDESDISKVYLTEKGVEMFGKILYQRPILKGNEKPKPNAVNEFISPPIQVKYYFNKFGKDGVILSPSDSFEEMRTLYVEGAEAYNREVEM

SEQ ID NO: 636 - protein, 392 aa, Unknown
  human gut metagenome sequence
MSMTPSTFLPKRDKNATYIAEVQSIPLSPSAYSVIIKDKSIFETSLSPNGSVSMSSFLTSIFDSAYIASLKYKSDDNYKYIGIPLLNAFVKWQIEEINDSLDDKSKEIIKSYLISKLSAKYEKTKTENAVRVRLSICRDLYDTLSSDDLYYENKVYSSTLRRFLKAVYEDYALLSDCERERLLFADNIIKINEVIKQNGSRYYSFIYAYSNMYSREKRRIRLIPYRIVSDEYKMYNYLVCLSDEKSAGKEFKADSCRISRLSGLSIAEKLSQKEYSSVTEYERLKEGHVKSVKHLLSDPRFGSDESDISKVYLTEKGVEMFGKILYQRPILKGNEKPKPNAVNEFISPPIQVKYYFNKFGKDGVIISPSDSFEEMRTLYVEGAEAYNREVEM

SEQ ID NO: 637 - protein, 392 aa, Unknown
  human gut metagenome sequence
MLIPPSTFLPKRDKNVPYIAEVQSIPLSPSAYSVIIKDKSIFETSLSPNGSVSMSSFLTSIFDSAYIASLKYKSDDNYKYIGIPLLNAFVEWQIEEIDDSLDDKSKEIIKSYLISKLSAKYEKTKTENAVRVRLSICRDLYDTLSSDDLYYENKVYSLTLRRFLKAVYEDYALLSDCERERLIFADNIIKINEVIKQNGSRYYSFIYAYSNMYSREKRRIRLIPYRIVSDEYKMYNYLVCLSDEKSAGKEFKADSYRISRLSGLSIAEKLSQKEYSSVTEYERLKEGHVKSVKHLLSDPRFGSDESDISKVYLTEKGVEMFGKILYQRPILKGNEKPKPNTVNEFISPPIQVKYYFNRFGKDGVILSPSDSFEEMRTLYVEGAEAYNREVEI

SEQ ID NO: 638 - protein, 392 aa, Unknown
  human gut metagenome sequence
MSMTPSTFLPKREDGVPYIAEVQSIPLSPSAYSVIIKDKSIFETSLSPNGSVSMSSFLTSIFDSAYIASLKYKSDDNYKYIGIPLLNAFVEWQIEEIDDGLDDKSKEIIKSYLISKLSAKYEKTKTENAVRVRLSICRDLYDTLSSDDLYYENKVYSSTLRRFLKAVYEDYALLSDCERERLIFADNIIKINEVIKQNGSRYYSFIYAYSNMYSREKRRIRLIPYRIVSDEYKMYNYLVCLSDEKSAGKEFKADSYRISRLSGLSIAEKLSQKEYSSVTEYERLKEVHVKSVKHLLSDPRFGSDESDISKVYLTEKGVEMFGKILYQRPILKGNEKPKPNAVNEFISPPIQVKYYFNKFGKDGVILSPSDSFEEMRTLYVEGAEAYNREVEI

SEQ ID NO: 639 - protein, 392 aa, Unknown
  human gut metagenome sequence
MLIPPSTFLPKREGGVPYIAEVQSIPLSPSAYSVIIKDKSIFETSLSPNGSVSMSSFLTSIFDSAYIASLKYKSDDNYKYIGIPLLNAFVKWQIEEIDDGLDDKSKEIIKSYLISKLSAKYEKTKTENAVRVRLSICRDLYDTLSSDDLYYENKVYSSTLRRFLKAVYEDYALLSDCERERLLFADNIIKINEVIKQNGSRYYSFIYAYSNMYSREKRRIRLIPYRIVSDEYKMYNYLVCLSDEKSAGKEFKADSYRISRLSRLSIAEKLSQKEYSSVTEYERLKEGHVKSVKHLLSDPRFGSDESDISKVYLTEKGVEMFGKILYQRPILKDNEKPKPNAVNEFISPPIQVKYYFNKFGKDGVILSPSDSFEEMRTLYVEGAEAYNREVEM

SEQ ID NO: 640 - protein, 392 aa, Unknown
  human gut metagenome sequence
MFIPPSTFLPKREGGVPYIAEVQSIPLSPSAYSVIIKDKSIFETSLSPNGSVSMSSFLTSIFDSAYIASLKYKSDDNYKYIGIPLLNAFVEWQIEEIDDGLDDKSKEIIKGYLISKLSAKYEKTKTENAVRVRLSICRDLYDTLSSDDLYYENKVYSSTLRRFLKAVYEDYALLSDCERERLIFADNIIKINEVIKQNDSRYYSFIYAYSNMYSREKHRIRLIPYRIVSDEYKMYNYLVCLSDEKSAGKEFKADSYRISRLSGLSIAEKLSQKEYSSVTEYERLKEGHVKSVKHLLSDPRFGSDESDISKVYLTEKGVEMFGKILYQRPILKGNEKPKPNAVNEFISPPIQVKYYFNKFGKDGVILSPSDSFEEMRTLYVEGAEAYNREVEM

SEQ ID NO: 641 - protein, 389 aa, Unknown
  human gut metagenome sequence
MLIPPSTFLPKRDKNATYIAEVQSIPLSPSAYSVIIKDKSIFETSLSPNGSVSMSSFLTSIFDSAYIASLKYKSEKYNDIPLLNAFVKWQIEEIDDGLDDKSKEIIKSYLISKLSAKYEKTKTENAVRVRLSICRDLYDTLSSDDLYYENKVYSSTLRRFLKAVYEDYALLSDCERERLLFADNIIKINEVIKQNGSRYYSFIYAYSNMYSREKRRIRLIPYRIVSDEYKMYNYLVCLSDEKSAGKEFKADSYRISRLSGLSIAEKLSQKEYSSVTEYERLKEVHVKSVKHLLSDPRFGSDESDISKVYLTEKGVEMFGKILYQRPILKGNEKPKPNAVNEFISQPIQVKYYFNKFGKDGVILSPSDSFEEMRTLYVEGAEAYNREVEM

SEQ ID NO: 642 - protein, 389 aa, Unknown
  human gut metagenome sequence
MSMTPSTFLPKRDTNIPYIAEVQSIPLSPSAYAVIVKDKSIFETSLSPNGSVSMSSFLTSIFDSAYIASLKYKSEKYNGIPLLNAFVKWQIEEIDDSLDDKSKEIIKSYLISKLSAKYEKTKTENAVRVRLSICRDLYDTLSSDDLYYENKVYSSTLRRFLKAVYEDYALLSDCERERLIFADNIIKINEVIKQNGSRYYSFIYAYSNMYSREKRRIRLIPYRIVSDEYKMYNYLVCLSDEKSAGKEFKADSYRISRLSGLSIAEKLSQKEYSSVTEYERLKEGHVKSVKHLLSDPRFGSDESDISKVYLTEKGVEMFGKILYQRPILKGNEKPKPNAVNEFISPPIQVKYYFNKFGKDGVILSPSDSFEEMRTLYVEGAEAYNREVEM

SEQ ID NO: 643 - protein, 392 aa, Unknown
  human gut metagenome sequence
MSMTPSTFLPKREGGVPYIAEVQSIPLSPSAYSVIIKDKSIFETSLSPNGSVSMSSFLTSIFDSAYIASLKYKTDDNYKYIGIPLLNAFVKWQIEEIGDSLDDKSKEIIKSYLISKLSAKYEKTKTENAVRVRLSICRDLYDTLSSDDLYYENKVYSSTLRRFLKAVYEDYALLSDCERERLIFADNIIKINEVIKQNGSRYYSFIYAYSNMYSREKRRIRLIPYRIVSDEYKMYNYLVCLSDEKSAGKEFKADSYRISRLSGLSIAEKLSQKEYSSVTEYERLKEGHVKSVKHLLSDPRFGSDESDISKVYLTEKGVEMFGKILYQRPILKGNEKPKPNAVNEFISPPIQVKYYFNKFGKDGVILSPSDSFEEMRTLYVEGAEAYNRVVEM

SEQ ID NO: 644 - protein, 389 aa, Unknown
  human gut metagenome sequence
MSMTPSTFLPKRDTNVPYIAEVQSIPLSPSAYSVIIKDKSIFETSLSPNGSVSMSSFLTSIFDSAYIASLKYKSEKYNGIPLLNAFVKWQIEEIDDSLDDKSKEIIKSYLISKLSAKYEKTKTENAVRVRLSICRDLYDTLSSDDLYYENKVYSSTLRRFLKAVYEDYALLSDCERERLIFADNIIKINEVIKQNGSRYYSFIYAYSNMYSREKRRIRLIPYRIVSDEYKMYNYLVCLSDEKSAGKEFKADSYRISRLSGLSIAEKLSQKEYSSVTEYERLKEGHVKSVKHLLSDPRFGSDESDISKVYLTEKGVEMFGKILYQRPILKGNEKPKPNAVNEFISPPIQVKYYFNKFGKDGVILSPSDSFEEMRTLYVEGAEAYNREVEM

SEQ ID NO: 645 - protein, 392 aa, Unknown
  human gut metagenome sequence
MLIPPSTFLPKRDKNATYIAEVQSIPLSPSAYSVIIKDKSIFETSLSTNGSVSMSSFLTSIFDSAYIASLKYKSDDNYKYIGIPLLNAFVKWQIEEIDDDLDDKSKEIIKSYLISKLSAKYEKTKTENAVRVRLSISRDLYDTLSSDDLYYENKVYSSTLRRFLKAVYEDYALLSDCERERLIFADNIIKINEVIKQNGSRYYSFIYAYSNMYSREKRRIRLIPYRIVSDEYKMYNYLVCLSDEKSAGKEFKADSCRISRLSGLSIAEKLSQKEYSSVTEYERLKEGHVKSVKHLLSDPRFGSDESDISKVYLTEKGVEMFGKILYQRPILKGNEKPKPNAVNEFISPPIQVKYYFNKFGKDGVILSPSDSFEEMRTLYVEGAEAYNREVEK

SEQ ID NO: 646 - protein, 389 aa, Unknown
  human gut metagenome sequence
MSMTPSTFLPKREDGVPYIAEVQSIPLSPSAYSVIIKDKSIFETSLSPNGSVSMSSFLTSIFDSAYIASLKYKSEKYNGIPLLNAFVKWQIEEIDDSLDDKSKEIIKSYLISKLSAKYEKTKTENAVRVRLSICRDLYDTLSSDDLYYENKVYSSTLRRFLKAVYEDYALLSDCERERLIFADNIIKINEVIKQNGSRYYSFIYAYSNMYSREKHRIRLIPYRIVSDEYKMYNYLVCLSDEKSAGKEFKADSYRISRLSGLSIAEKLSQKEYSSVTEYERLKEVHVKSVKHLLSDPRFGSDESDISKVYLTEKGVEMFGKILYQRPILKGNEKPKPNTVNEFISPPIQVKYYFNKFGKDGVILSPSDSFEEMRTLYVEGAEAYNREVEM

SEQ ID NO: 647 - protein, 392 aa, Unknown
  human metagenome sequence
MLIPPSTFLPKREDGVPYIAEVQSIPLSPSAYSVIIKDKSIFETSLSPNGSVSMSSFLTSIFDSAYIASLKYKSDDNYKYIGIPLLNAFVEWQIEEIDDSLDDKSKEIIKSYLISKLSAKHEKTKTENAVRVRLSICRDLYDTLSSDDLYYENKVYSSTLRRFLKAVYEDYALLSDCERERLLFADNIIKINEVIKQNGSRYYSFIYAYSNMYSREKRRIRLIPYRIVSDEYKMYNYLVCLSDEKSAGKEFKADSYRISRLSGLSIAEKLSQKEYSSVTEYERLKEGHVKSVKHLLSDPRFGSDESDISKVYLTEKGVEMFGKILYQRPILKGNEKPKPNAVNEFISPPIQVKYYFNKFGKDGVILSPSDSFEEMRTLYVEGAEAYNREVEM

SEQ ID NO: 648 - protein, 392 aa, Unknown
  human metagenome sequence
MSMTPSTFLPKRDKNATYIAEVQSIPLSPSAYSVIIKDKSIFETSLSPNGSVSMSSFLTSIFDSAYIASLKYKSDDNYKYIGIPLLNAFVKWQIEEIDDSLDDKSKEIIKSYLISKLSAKYEKTKTENAVRVRLSICRDLYDTLSSDDLYYENKVYSSTLRRFLKAVYEDYALLSDCERERLIFADNIIKINEVIKQNGSRYYSFIYAYSNMYSREKRRIRLIPYRIVSDEYKMYNYLVCLSDEKSAGKEFKADSYRISRLSGLSIAEKLSQKEYSSVTEYERLKEGHVKSVKHLLSDPRFGSDESDISKVYLTEKGVEMFGKILYQRPILKGNEKPKPNAVNEFISPPIQVKYYFNKFGKDGVILSPSDSFEEMRTLYVEGAEAYNREVEM

SEQ ID NO: 649 - protein, 392 aa, Unknown
  human metagenome sequence
MSMTPSTFLPKREGGVPYIAEVQSIPLSPSAYSVIIKDKSIFETSLSPNGSVSMSSFLTSIFDSAYIASLKYKSDDNYKYIGIPLLNAFVKWQIEEIDDSLDDKSKEIIKSYLISKLSAKYEKTKTENAVRVRLSICRDLYDTLSSDDLYYENKVYSLTLRRFLKAVYEDYALLSDCERERLIFADNIIKINEIIKQNGSRYYSFIYAYSNMYSREKRRIRLIPYRIVSDEYKMYNYLVCLSDEKSAGKEFKADSYRISRLSGLSIAEKLSQKEYSSVTEYERLKEGHVKSVKHLLSDPRFGSDESDISKVYLTEKGVEMFGKILYQRPILKGNEKPKPNAVNEFISPPIQVKYYFNKFGKDGVILSPSDSFEEMRTLYVEGAEAYNREVEM

SEQ ID NO: 650 - protein, 392 aa, Unknown
  human metagenome sequence
MSMTPSTFLPKREGGVPYIAEVQSIPLSPSAYSVIIKDKSIFETSLSPNGSVSMSSFLTSIFDSAYIASLKYKSDDNYKYIGIPLLNAFVEWQIEEIDDGLDDKSKEIIKSYLISKLSAKYEKTKTENAVRVRLSICRGLYDTLSSDDLYYENKVYSSTLRRFLKAVYEDYALLSDCERERLIFADNIIKINEVIKQNGSRYYSFIYAYSNMYSREKRRIRLIPYRIVSDEYKMYNYLVCLSDEKSAGKEFKADSYRISRLSGLSIAEKLSQKEYSSVTEYERLKEVHVKSVKHLLSDPRFGSDESDISKVYLTEKGVEMFGKILYQRPILKGNEKPKPNAVNEFISPPIQVKYYFNKFGKDGVILSPSDSFEEMRTLYVEGAEAYNREVEM

SEQ ID NO: 651 - protein, 392 aa, Unknown
  human metagenome sequence
MLIPPSTFLPKREDGVPYIAEVQSIPLSPSAYSVIIKDKSIFETSLSTNGSVSMSSFLTSIFDSAYIASLKYKSDDNYKYIGLPLLNAFVKWQIEEIDDGLDDKSKEIIKSYLISKLSAKYKKTKTENAVRVRLSICRDLYDTLSSDDLYYENKVYSSTLRRFLKAVYEDYALLSDCERERLIFADNIIKINEVIKQNGSRYYSFIYAYSNMYSREKHRIRLIPYRIVSDEYKMYNYLVCLSDEKSAGKEFKADSYRISRLSGLSIAEKLSQKEYSSVTEYERLKEGHVKSLKHLLSDPRFGSDESDISKVYLTEKGVEMFGKILYQRPILKGNEKPKPNAVNEFISPPIQVKYYFNKFGKDGVILSPSDSFEEMRTLYVEGAEAYNREVEM

SEQ ID NO: 652 - protein, 392 aa, Unknown
  human metagenome sequence
MSMTPSTFLPKREDGVPYIAEVQSIPLSPSAYSVIIKDKSIFETSLSPNGSVSMSSFLTSIFDSAYIASLKYKSDDNYKYIGIPLLNAFVEWQIEEIDDGLDDKSKEIIKSYLISKLSAKYEKTKTENAVRVRLSICRDLYDTLSSDDLYYENKVYSSTLRRFLKAVYEDYALLSDCERERLLFADNIIKINEVIKQNGSRYYSFIYAYSNMYSREKRRIRLIPYRIVSDEYKMYNYLVCLSDEKSTGKEFKADSYRISRLSGLSIAEKLSQKEYSSVTEYERLKEGHVKSVKHLLSDPRFGSDESDISKVYLTEKGVEMFGKILYQRPILKGNEKPKPNAVNEFISPPIQVKYYFNKFGKDGVILSPNDSFEEMRTLYVEGAEAYNREVEM

SEQ ID NO: 653 - protein, 392 aa, Unknown
  human metagenome sequence
MSMTPSTFLPKREGGVPYIAEVQSIPLSPSAYSVIIKDKSIFETSLSPNGSVSMSSFLTSIFDSAYIASLKYKSDDNYKYIGIPLLNAFVEWQIEEIDDGLDDKSKEIIKSYLISKLSAKYEKTKTENAVRVRLSICRDLYDTLSSDDLYYENKVYSSTLRRFLKAVYEDYALLSDCERERLLFADNIIKINEVIKQNGSRYYSFIYAYSNMYSREKRRIRLIPYRIVSDEYKMYNYLVCLSDEKSAGKEFKADSYRISRLSGLSIAEKLSQKEYSSVTEYERLKEGHVKSVKHLLSDPRFGSDESDISKVYLTEKGVEMFGKILYQRPILKGNEKPKPNAVNEFISPPIQVKYYFNKFGKDGVILSPSDSFEEMRTLYVEGAEAYNREVEM

SEQ ID NO: 654 - protein, 392 aa, Unknown
  human metagenome sequence
MLIPPSTFLPKRDKNATYIAEVQSIPLSPSAYSVIIKDKSIFETSLSPNGSVSMSSFLTSIFDSAYIASLKYKSDDNYKYIGIPLLNAFVKWQIEEIDDGLDDKSKEIIKSYLISKLSAKYEKTKTENAVRVRLSICRDLYDTLSSDDLYYENKVYSSTLRRFLKAVYEDYALLSDCERERLLFADNIIKINEVIKQNGSRYYSFIYAYSNMYSREKRRIRLIPYRIVSDEYKMYNYLVCLSDEKSAGKEFKADSYRISRLSGLSIAEKLSQKEYSSVTEYERLKEGHVKSVKHLLSDPRFGSDESDISKVYLTEKGVEMFGKILYQRPILKGNEKPKPNAVNEFISPPIQVKYYFNKFGKDGVILSPSDSFEEMRTLYVEGAEAYNREVEK

SEQ ID NO: 655 - protein, 389 aa, Unknown
  human metagenome sequence
MSMTPSTFLPKREGGVPYIAEVQSIPLSPSAYSVIIKDKSIFETSLSPNGSVSMSSFLTRIFDSAYIASLKYKSEEYNGIPLLNAFVQWQIEEIDDSLDDKSKEIIKSYLISKLSAKYEKTKTENAVRVRLSICRDLYDTLSSDDLYYENKVYSSTLRRFLKAVYEDYALLSDCERERLIFADNIIKINEVIKQNGSRYYSFIYAYSNMYSREKRRIRLIPYRIVSDEYKMYNYLVCLSDEKSAGKEFKADSYRISRLSGLSIAEKLSQKEYSSVTEYERLKEVHVKSVKHLLSDPRFGSDESDISKVYLTEKGVEMFGKILYQRPILKGNEKPKPNAVNEFISPPIQVKYYFNKFGKDGVILSPSDSFEEMRTLYVEGAEAYNREVEM

SEQ ID NO: 656 - protein, 392 aa, Unknown
  human metagenome sequence
MSMTPSTFLPKREDGVPYIAEVQSIPLSPSAYSVIIRDKSIFETSLSPNGNVSMSSFLTSIFDSAYIASLKYKSDDNYKYIGIPLLNAFVKWQIEEIDDDLDDKSKEIIKSYLISKLSAKYEKTKTENAVRVRLSICRDLYDTLSSDDLYYENKVYSSTLRRFLKAVYEDYALLSDCERERLIFADNIIKINEVIKQNGSRYYSFIYAYSNMYSREKRRIRLIPYRIVSDEYKMYNYLVCLSDEKSAGKEFKADSYRISRLSGLSIAEKLSQKEYSSVTEYERLKEGHVKSVKHLLSDPRFGSDESDISKVYLTEKGVEMFGKILYQRPILKGNEKPKPNAVNEFISPPIQVKYYFNKFGKDGVILSPSDSFEEMRTLYVEGAEAYNREVEM

SEQ ID NO: 657 - protein, 392 aa, Unknown
  human metagenome sequence
MLIPPSTFLPKREDGVPYIAEVQSIPLSPSAYSVIIKDKSIFETSLSPNGSVSMSSFLTSIFDSAYIASLKYKSDDNYKYIGIPLLNAFVEWQIEEIDDSLDDKSKEIIKSYLISKLSAKHEKTKTENAVRVRLSICRDLYDTLSSDDLYYENKVYSSTLRRFLKAVYEDYALLSDCERERLIFADNIIKINEIIKQNGSRYYSFIYAYSNMYSREKRRIRLIPYRIVSDEYKMYNYLVCLSDEKSAGKEFKADSYRISRLSGLSIAEKLSQKEYSSVTEYERLKEGHVKSVKHLLSDPRFGSDESDISKVYLTEKGVEMFGKILYQRPILKGNEKPKPNAVNEFISPPIQVKYYFNKFGKDGVILSPSDSFEEMRTLYVEGAEAYNREVEM

SEQ ID NO: 658 - protein, 392 aa, Unknown
  human metagenome sequence
MLIPPSTFLPKREGGVPYIAEVQSIPLSPSAYSVIIKDKSIFETSLSPNGSVSMSSFLTSIFDSAYIASLKYKSDDNYKYNGIPLLNAFVEWQIEEIDDGLDDKSKEIIKSYLISKLSAKYEKTKTENAVRVRLSICRDLYDTLSSDDLYYENKVYSSTLRRFLKAVYEDYALLSDCERERLIFADNIIKINEVIKQNGSRYYSFIYAYSNMYSREKRRIRLIPYRIVSDEYKMYNYLVCLSDEKSAGKEFKADSYRISRLSGLSIAEKLSQKEYSSVTEYERLKEGHVKSVKHLLSDPRFGSDESDISKVYLTEKGVEMFGKILYQRPILKGNEKPKPNAVNEFISPPIQVKYYFNKFGKDGVILSPSDSFEEMRTLYVEGAEAYNREVEI

SEQ ID NO: 659 - protein, 392 aa, Unknown
  metagenome sequence
MLIPPSTFLPKREGGVPYIAEVQSIPLSPSAYSVIIKDKSIFETSLSPNGSVSMSSFLTSIFDSAYIASLKYKSDDNYKYIGIPLLNAFVKWQIEEIDDGLDDKSKDIIKSYLISKLSAKYEKTKTENAVRVRLSICRDLYDTLSSDDLYYENKVYSSTLRRFLKAVYEDYALLSDCERERLLFADNIIKINEVIKQNGSRYYSFIYAYSNMYSREKRRIRLIPYRIVSDEYKMYNYLVCLSDEKSAGKEFKADSYRISRLSGLSIAEKLSQKEYSSVTEYERLKEGHVKSVKHLLSDPRFGSDESDISKVYLTEKGVEMFGKILYQRPILKGNEKPKPNAVNEFISPPIQVKYYFNKFGKDGVIISPSDSFEEMRTLYVKGAEAYNREVEM

SEQ ID NO: 660 - protein, 392 aa, Unknown
  metagenome sequence
MSMTPSTFLPKREKNATYIAEVQSIPLSPAAYSVIIKDKSIFETSLSPNGSVSMSSFLTSIFDSAYIASLKYKSDDNYKYNGIPLLNAFVKWQIEEIDDGLDDKSKEIIKSYLISKLSAKYEKTKTENAVRVRLSICRDLYDTLSSDDLYYENKVYSSTLRRFLKAVYEDYALLSDCERERLLFADNIIKINEVIKQNGSRYYSFIYAYSNMYSREKHRIRLIPYRIVSDEYKMYNYLVCLSDEKSAGKEFKADSYRISRLSRLSIAEKLSQKEYSSVTEYERLKEGHVKSVKHLLSDPRFGSDESDISKVYLTEKGVEMFGKILYQRPILKGNERPKHNAVNEFISPPIQVKYYFNKFGKDGVILSPSDSFEEMRTLYVEGAEAYNRVVEK

SEQ ID NO: 661 - protein, 392 aa, Unknown
  metagenome sequence
MSMIPSTFLPKREGGVPYIAEVQSIPLSPSAYSVIIKDKSIFETSLSPYGSVSMSSFLTSIFDSAYIASLKYKSDDNYKYIGIPLLNAFVKWQIEEIDDGLDDKSKEIIKSYLISKLSAKYEKTKTENAVRVRLSICRDLYDTLSSDDLYYENKVYSSTLRRFLKAVYEDYALLSDCERERLLFADNIIKINEVIKQNGSRYYSFIYAYSNMYSREKRRIRLIPYRIVSDEYKMYNYLVCLSDEKSAGKEFKADSCRISRLSGLSIAEKLSQKEYSSVTEYERLKEGHVKSVKHLLSDPRFGSDESDISKVYLTEKGVEMFGKILYQRPILKGNEKPKPNAVNEFISPPIQVKYYFNKFGKDGVILSPSDSFDEMRTLYVEGAEAYNREVEM

SEQ ID NO: 662 - protein, 392 aa, Unknown
  metagenome sequence
MLIPPSTFLPKREGGVPYIAEVQSIPLSPSAYSVIIKDKSIFETSLSPNGSVSMSSFLTSIFDSAYIASLKYKSDDNYKYIGIPLLNAFVEWQIEEIDDGLDDKSKEIIKGYLISKLSAKYEKTKTENAVRVRLSICRDLYDTLSSDDLYYENKVYSSTLRRFLKAVYEDYALLSDCERERLIFADNIIKINEVIKQNGSRYYSFIYAYSNMYSREKRRIRLIPYRIVSDEYKMYNYLVCLSDEKSAGKEFKADSYRISRLSGLSIAEKLSQKEYSSVTKYERLKEVHVKSVKHLLSDPRFGSDESDISKVYLTEKGVEMFGKILYQRPILKGNEKPKPNAVNEFISPPIQVKYYFNKFGKDGVIISPSDSFEEMRTLYVEGAEAYNREVEM

SEQ ID NO: 663 - protein, 392 aa, Unknown
  metagenome sequence
MSMTPSTFLPKREGGVPYIAEVQSIPLSPSAYSVIIKDKSIFETSLSPNGSVSMSSFLTSIFDSAYIASLKYKSDDNYKYIGIPLLNAFVKWQIEEIDDGLDDKSKEIIKSYLISKLSAKYEKTKTENAVRVRLSICRDLYDTLSSDDLYYENKVYSSTLRRFLKAVYEDYALLSDCERERLLFADNIIKINEVIKQNGSRYYSFIYAYSNMYSREKRLIRLIPYRIVSDEYKMYNYLVCLSDEKSAGKEFKADSYRISRLSGLSIAEKLSQKEYFSVTEYERLKEGHVKSVKHLLSDPRFGSDESDISKVYLTEKGVEMFGKILYQRPILKGNEKPKPNAVNEFISPPIQVKYYFNKFGKDGVILSPSDSFEEMRTLYVEGAEAYNREVEI

SEQ ID NO: 664 - protein, 390 aa, Unknown
  metagenome sequence
MIPSTFLPKREGGVPYIAEVQSIPLSPSAYSVIIKDKSIFETSLSPYGSVSMSSFLTSIFDSAYIASLKYKSDDNYKYIGIPLLNAFVKWQIEEIDDGLDDKSKEIIKSYLISKLSAKYEKTKTENAVRVRLSICRDLYDTLSSDDLYYENKVYSSTLRRFLKAVYEDYALLSDCERERLLFADNIIKINEVIKQNGSRYYSFIYAYSNMYSREKRRIRLIPYRIVSDEYKMYNYLVCLSDEKSAGKEFKADSCRISRLSGLSIAEKLSQKEYSSVTEYERLKEGHVKSVKHLLSDPRFGSDESDISKVYLTEKGVEMFGKILYQRPILKGNEKPKPNAVNEFISPPIQVKYYFNKFGKDGVILSPSDSFDEMRTLYVEGAEAYNREVEM

SEQ ID NO: 665 - protein, 392 aa, Unknown
  metagenome sequence
MLIPPSTFLPKREGGVPYIAEVQSIPLSPSAYSVIIKDKSIFETSLSPNGSVSMSSFLTSIFDSAYIASLKYKSDDNYKYIGIPLLNAFVKWQIEEIDDGLDDKSKEIIKSYLISKLSAKYEKTKTENAVRVRLSICRDLYDTLSSDDLYYENKVYSSTLRRFLKAVYEDYALLSDCKRERLLFADNIIKINEVIKQNGSRYYSFIYAYSNMYSREKRRIRLIPYRIVSDEYKMYNYLVCLSDEKSSGKEFKADSYRISRLSGLSIAEKLSQKEYSSVTEYERLKEVHVKSVKHLLSDPRFGSDESDISKVYLTEKGVEMFGKILYQRPILKGNEKPKPNAVNEFISPPIQVKYYFNKFGKDGVIISPSDSFEEMRTLYVEGAEAYNREVEM

SEQ ID NO: 666 - protein, 389 aa, Unknown
  metagenome sequence
MSMTPSTFLPKREGGVPYIAEVQSIPLSPSAYSVIIKDKSIFETSLSPNGSVSMSSFLTSIFDSAYIASLKYKSEKYNGIPLLNAFVKWQIEEIDDGLDDKSKEIIKSYLISKLSAKYEKTKTENAVRVRLSICRDLYDTLSSDDLYYENKVYSSTLRRFLKAVYEDYALLSDCERERLIFADNIIKINEVIKQNGSRYYSFIYAYSNMYSREKRRIRLIPYRIVSDEYKMYNYLVCLSDEKSAGKEFKADSCRISRLSGLSIAEKLSQKEYSSVTEYERLKEGHVKSVKHLLSDPRFGSDESDISKVYLTEKGVEMFGKILYQRPILKGNEKPKPNAVNEFISPPIQVKYYFNKFGKDGVILSPSDSFEEMRTLYVEGAEAYNREVEM

SEQ ID NO: 667 - protein, 392 aa, Unknown
  metagenome sequence
MSMAPSTFLPKREDGVPYIAEVQSIPLSPSAYSVIIKDKSIFETSLSPNGSVSMSSFLTSIFDSAYIASLKYKSDDNYKYIGIPLLNAFVKWQIEEIDDGLDDKSKEIIKSYLISKLSAKYEKTKTENAVRVRLSICRDLYDTLSSDDLYYENKVYSSTLRRFLKAVYEDYALLSDCKRERLLFADNIIKINEVIKQNGSRYYSFIYAYSNMYSREKRRIRLIPYRIVSDEYKMYNYLVCLSDEKSSGKEFKADSYRISRLSGLSIAEKLSQKEYSSVTEYERLKEGHVKSVKHLLSDPRFGSDESDISKVYLTEKGVEMFGKILYQRPILKGNEKPKPNAVNEFISPPIQVKYYFNKFGKDGVIISPSDSFEEMRTLYVEGAEAYNREVEM

SEQ ID NO: 668 - protein, 436 aa, Ruminococcus flavefaciens
MQSAWGILSLYGRYGIIIVIRGCDMENKGKQREFIKDYNKIVPFLEKVFYYGTFSSEDYEKMDMMKKSKYSDYKRILEFAFRDVLYEKKNINGKKALGLRIDHFYDPHRAFLRFFTLKSFVSIERLFLTCYILKRISKKGKCTINDICIGLDEVSVDDEVKDRKSTISRIIKNMVDYGFLIKKGSAYSINTGAKTLNNVALLNLIDICTNAYPISICGSCIQNKIDQNYQSPFLIKHLHLGQIFNDELIWKLLIYANEKKQLCIELKKGIKLRELLPYRIITNRETGRQYLFAIYVGTNNFDEYLMLRLDKISDIKIEASECEIPDDTVLKEKYDTAFRYSFNGTTFLKRDQQPESGILVYDKSFEWNIKKHFPYSDAVSVDEKHNKVSIKVNTLTELKPWLRRNYDKVSLVESSDDTVDKMCDELKKWRKMYGII

SEQ ID NO: 669 - protein, 421 aa, Unknown
  mammals-digestive system-feces sequence
MSADLGRNKLLLNENTLKIAKGAFYYGCFTVKHFEEQGISKSTYNRCKDFLLHVFQDRIEEINVPHSRTRMLRLKNDQFEDACNLLLDLFTYQPASSIEIVTFLSVLRVFTVAAPETSYTFENINKPISHICEDRRTFKKKLHTLVDRGYLLCERRDKRSFQYRLAPVIFDRLDEFALYRLNALVDLCKCIYHPATCGRYLLDTLAFFNQQKSVNDETIFFCKHMHMGQVFDDAVLWKLMTAIYEKKIISFTVNGKSYRFQQPCRIIINESDGRRYLYSIGLNTYTKNGKMHRIDQISGIKEEKHTDEISVFSSEEADRRYHNSTQGSFNGISMPRKKRETAVLVYKKESYPEIQRHFPDAVPEVYDDDHDQVQITVNSLKDIKPWLRLHLGEIRLQSTSNDVKDEFEKEMAEWRAMYGIV

SEQ ID NO: 670 - protein, 328 aa, Ruminococcus flavefaciens
MELSKLELINVYNNCYFISLVNVLNSLTDGEKLDKYKLNNRIANVVNDSQGYFSGKIADEVFDKCSLLFDITPDKTFISRNKVPIPTCFTVIERIYIKSLINSKYGKLFLSPKEAEEIISCLGDVPDVPINDYLISLPSRTYDYSDKYINNVRFLLMAIKENKEIIYSNKTKEIVHKNKHGYPIRIEYSALYDLFQLSLWSSEGNRPVKINLHSIYGINLTGNVWGEKKSPIEMMETKRCQEPIVIEISNDNNTLERANILFSMYNTETEKLKNGTYRKKLYYYYFDENEIVNSIFSFGPYVKVISPTVIVDKIKEKIISLSSISNIL

SEQ ID NO: 671 - protein, 326 aa, Unknown
  gut metagenome sequence
MKLFHKYYSRKLLFAIEVLDALQGAKEQTLNWGELTRLSNRLGMTADLRAEVLNVLTEESRIVRVEDTSNYRLDTSWTTTTPKLPTSKIEEDYLQMILRLPQAEQFLSRELRDRLTDPQASILNTDAIQTIEPNGEQTQLKLSQPEFRMILDAIEMGCAIRYRYISEQGKAAMEKHAVPWRLQYSAFDNRWWIILYTLKDHRCVKIALGSISDVQLEKHIQVKEADILKAREKDLAAEPAILQVKNTKNALERCFFVMDRQQFEDSELLEDGSAKLTYRYYHFETSDLLRRLLYLGPAVALIGPPKLRKALLEHVERALNHFRAEA

SEQ ID NO: 672 - protein, 16 aa, Artificial Sequence
  Synthetic peptide
  MOD_RES (2)..(5): Any amino acid
  MOD_RES (7)..(12): Any amino acid
  MOD_RES (15)..(15): Any amino acid
DXXXXQXXXXXXDIXK

SEQ ID NO: 673 - protein, 15 aa, Artificial Sequence
  Synthetic peptide
  MOD_RES (2)..(3): Any amino acid
  MOD_RES (6)..(6): Any amino acid
  MOD_RES (8)..(12): Any amino acid
KXXKNXGXXXXXLRE

SEQ ID NO: 674 - protein, 4 aa, Artificial Sequence
  Synthetic peptide
KDEL
